(19) United States
(12) Patent Application Publication
(10) Pub. No.: US 2023/0159662 A1
(43) Pub. Date: May 25, 2023

(54) ANTIBODY COMPOSITION

(71) Applicant: Kyowa Kirin Co., Ltd., Tokyo (JP)

(72) Inventors: Rinpei NIWA, Tokyo (JP); Katsuaki USAMI, Tokyo (JP)

(73) Assignee: Kyowa Kirin Co., Ltd., Tokyo (JP)

(21) Appl. No.: 17/916,275

(22) PCT Filed: Apr. 1, 2021
(86) PCT No.: PCT/JP2021/014181

§ 371 Date: Sep. 30, 2022

(30) Foreign Application Priority Data
Apr. 1, 2020 (JP) 2020-066313
Oct. 29, 2020 (JP) 2020-181493

(51) Int. Cl. C07K 16/46; C12N 15/63

(52) U.S. Cl. CPC C07K 16/468; C12N 15/63; C07K 2317/52; C07K 2317/732

(57) ABSTRACT

An object of the present invention is to provide an antibody composition, which exhibits an effector function more specifically for a target cell coexpressing two types of antigens that are different from each other and damages the target cell, and also can maintain affinity for the individual target antigens sufficiently high. The present invention relates to an antibody composition against a first antigen and a second antigen that are different from each other, including a first IgG half-molecule and a second IgG half-molecule and relates to the first IgG half-molecule and the second IgG half-molecule constituting the antibody composition.

### TECHNICAL FIELD

[0001] The present invention relates to an antibody composition and a method for producing the same, an IgG half-molecule, and a kit including the IgG half-molecule.

### BACKGROUND ART

[0002] It is known that antibody preparations approved so far have various action mechanisms (Non-Patent Literature 1). Representative examples thereof include effector functions possessed by an IgG class antibody molecule such as a neutralization activity of inhibiting binding of a ligand for a growth factor or the like and a receptor, an agonistic activity of activating a bound receptor, an antibody-dependent cellular cytotoxicity (hereinafter ADCC) activity, and a complement-dependent cytotoxicity (hereinafter CDC) activity. Among these, from biomarker analysis of a clinical study of rituximab or trastuzumab, the ADCC activity is suggested to be a clinically important action mechanism of an antibody preparation (Non-Patent Literatures 2 and 3).

[0003] An antibody is a tetrameric protein of about 150 kDa composed of a total of four molecules of polypeptide chains: two molecules of immunoglobulin heavy chain (H chain) and two molecules of immunoglobulin light chain (L chain). A shown in FIG. 1, an antibody is divided into a variable region (V) including a complementarity-determining region (CSR) that is directly involved in antigen binding and has a different amino acid sequence for each antibody clone, and a constant region including an Fc region (hereinafter also abbreviated as Fc) that controls the above-mentioned effector function or a blood half-life. The Fc includes CH1 to CH3 domains and a hinge domain.

[0004] A human antibody is classified into 5 classes: IgG, IgA, IgM, IgD, and IgE having different functions according to the sequence of the H chain constant region. Further, a human IgG class is divided into 4 subclasses from IgG1 IgG4.

[0005] Among these, antibody of the IgG1 subclass is known to have the highest ADCC activity and CDC activity (Non-Patent Literature 4), and many antibody preparations including rituximab and trastuzumab are IgG1.

[0006] On the other hand, the IgG4 subclass is known to have characteristics such that the effector function is weak as compared with other subclasses, and further it has an amino acid sequence of an intrinsic hinge domain, and reversible association and dissociation of two H chains in the body called “Fab arm exchange” occurs due to a weak interaction between two CH3 domains as compared with other subclasses (Non-Patent Literatures 5 and 6).

[0007] The ADCC activity, is a mechanism of cytotoxicity caused through the expression of a molecule such as perform, granzyme, or Fas as a result of activation of a natural killer cell (hereinafter NK cell) or the like by recognizinig Fc of an IgG-type antibody bound to a membrane antigen on a cancer cell surface via a type of an Fc receptor, FcγRIIIa (hereinafter also abbreviated as CD16a) (Non-Patent Literature 1).

[0008] By X-ray crystallography, the binding mode between CD16a and human IgG1 has been revealed (Non-Patent Literatures 7 and 8), The CD16a-binding domain on Fc of IgG1 is present at two sites due to the point symmetry of the structure of Fc, and in fact, Fc and IgG bind at a number ratio (stoichiometry) of 1.1 Then, in the two CH2 domains constituting Fc, contact is made in regions (hereinafter CD16a-binding domains) that are different from each other.

[0009] Specifically, CD16a interacts with L235, G236, G237, P238, S239, D265, V266, S267, H268, E269, E294, Q295, Y296, N297S298, T299, R301, N325, A327, I332, or the like on one of the CH2 domains of IgG1. On the other hand, CD16a simultaneously interacts with L235, G236, G237,K326, A327, L328, P329, A330, or the like on the other CH2 domain of IgG1 (the number represent the position of an amino acid on the CH2 domain according to EU numbering) (Non -Patent Literatures 7, 8, 9, and 10).

[0010] It is possible to enhance an ADCC activity by artificially altering the CH2 domain of an antibody preparation to increase the binding ability to CD16a. In fact, there are many known examples of enhancing n ADCC activity by altering an amino acid of the CH2 domain (Non-Patent Literature 11). It is known that an IgG1 antibody in which different amino acid alterations are added to the CH2 domain of one H chain of IgG1 and the CH2 domain of the other H chain, and the two H chains are bound through a disulfide bond has a high ADCC activity (Patent Literature 1).

[0011] Further, it is also known that an ADCC activity can be enhanced by altering a sugar chain of an N-linked complex sugar chain that is bound to Fc (Non Patent Literature 12). Particularly, the technique for enhancing an ADCC activity by a sugar chain alteration is applied to approved antibody preparations such as mobgamulizumab (Non-Patent Literature 13) and obinutuzumab (Non-Patent Literature 14).

[0012] A bispecific antibody is an artificially altered antibody molecule configured to be able to bind to two different types of antigens unlike natural antibodies, and many molecular forms have been reported (Non-Patent Literature 15).

[0013] A schematic diagram of a structure at a bispecific antibody is shown FIG. 2A. As an application of the bispecific antibody to a medicine, for example, damage to a cancer cell by binding to the cancer cell and CD3 of a T cell surface (hereinafter, a CD3 bispecific antibody) so as to crosslink both, and enhancement of a drug efficacy by neutralizing two types of functional molecules are exemplified (Non-Patent Literature 15).

[0014] In a treatment of a cancer or an autoimmune disease, in order to remove a cancer coil that is an etiologic cell or a self-reactive lymphocyte, an antibody preparation exhibiting an effector function of an IgG-type antibody or a T cell recruiting function of a CD3 bispecific antibody is used.

[0015] However, such an etiologic cell is originally derived from a normal cell, and it is generally rare that an etiologic cell can be accurately distinguished from a normal cell by a single surface marker molecule. Therefore, the removal of an etiologic cell utilizing an effector function like also attacks a normal cell expressing the same antigen molecule, and may result in adverse effects in many cases.

[0016] For example, CD20 that is target antigen of rituximab to be used in a treatment of lymphomas at various autoimmune diseases is expressed in normal B cell, and HER2 that is a target antigen of trastuzumab be used in a treatment of breast cancer is expressed in a cardiomyocyte. Therefore, there are concerns about adverse effects by disrupting a normal cell with such an antibody preparation.

[0017] On the other hand, Maxor et al. have reported a case where a bispecific antibody having reduced affinity for individual target antigens exhibits a relatively strong effector function for a double-positive (Non-Patent Literature 16).

[0018] Further, there has been a report on a combination of antigen-binding molecules including a first antigen-binding molecule having a first antigen-binding domain that binds to a first antigen and a first polypeptide including either one or both of first CH2 and first CH3, and a second antigen-binding molecule having a second antigen-binding domain that binds to a second antigen and a second polypeptide including either one or both of second CH2 and second CH3, wherein the first antigen binding molecule and the second antigen-binding molecule are not bound through a covalent bond, and are more likely to form a heterodimer than a homodimer when mixed in a liquid (Patent Literature 2).

### CITATION LIST

### Patent Literature

[0019] Patent Literature WO2013/002362

[0020] Patent Literature 2: WO2018/155611

### Non-Patent Literature

[0021] Non-Patent Literature 1: Carter P. Nat Rev Cancer 2001; 1: 118-29

[0022] Non-Patent Literature 2: Cartron G, Dacheux Salles G, et al. Blood 2002: 99: 754-8

[0023] Non-Patent Literature 3: Weng W. K. Levy R. J Clin Oncol 2003; 21: 3940-7

[0024] Non-Patent Literature 4: Birch, J. R., Lennox, E. S. (Eds.), Monoclonal Antibodies: Principles and Applications, Wiley-Liss, Inc., New York, p. 45 (1995)

[0025] Non-Patent Literature 5: Aalberse R C and Schuurman J, Immunology 2002; 105:9-

[0026] Non-Patent Literature 6: Labrijn A F, Nat Biotechnol 2009; 27: 767-71

[0027] Non-Patent Literature 7: Sondermann P. Nature 2000; 406: 267-73

[0028] Non-Patent Literature 8: Radaev S, J Biol. Chem 2001; 276: 16469-77

[0029] Non-Patent Literature 9: Ferrara C, Proc Natl Acad Sci 2011; 108; 12669-74

[0030] Non-Patent Literature 10: Mizushima T, Genes Cells 2011; 16: 1071-80

[0031] Non-Patent Literature 11: Strohl W R, Curr Opin Biotechnol 2009; 20: 685-91

[0032] Non-Patent Literature 12: Niwa R, J Pharm Sci 2015; 930-41

[0033] Non-Patent Literature 13: Beck A, mAbs 2012; 4: 419-25

[0034] Non-Patent Literature 14: Goede V, N Engl J Med 2014; 370: 1101-10

[0035] Non-Patent Literature 15: Byrne Trends Biotechnol 2011; 31: 621-32

[0036] Non-Patent Literature 16: Mazor Y, MAbs 2015; 7: 377-89

### SUMMARY OF INVENTION

### Technical Problem

[0037] As one method for solving the above-mentioned adverse effects, a technique using a bispecific antibody that exhibits an effector function only when it recognizes two different types of antigens for removing an etiologic cell with higher selectivity is conceivable.

[0038] However, as shown in FIG. 2B, when a target cell is attacked using an effector function by as normal bispecific antibody, there is a concern that the bispecific antibody may bind to and attack not only a target cell coexpressing two types of antigens (hereinafter also abbreviated as double-positive cell), but also a expressing only one type of target antigen (hereinafter also abbreviated as single-positive cell). Further, a technique for an antibody that exhibits an effector function specifically for a double-positive cell and damages the cell regardless of affinity for individual target antigens has not been known.

[0039] Therefore, present inventors aim to provide an antibody composition which exhibits an effector function more specifically fora target cell coexpressing two types of antigens that are different from each other and damages the target cell.

### Solution to Problem

[0040] The present inventors conceived that the above problem can be solved by an antibody composition having the following elements [1] to [3] that are different from a normal human IgG1 antibody in a constant region of an antibody molecule as shown in FIG. 3.

[0041] [1] It is a mixture of antibody half-molecules (first and second IgG half-molecules) having antigen binding sites for a first antigen (antigen molecule) and a second antigen (antigen molecule Y) that are different front each other. That is, it is a mixture of “HL molecules” in which a covalent bond formed by an inter-H chain disulfide bond is not present between the first IgG half-molecule and the second IgG half-molecule.

[0042] The HL molecules against each of the antigen molecules X and Y bind to the surface of a target cell (X/Y double positive cell) expressing both the antigen molecules X and Y and thereafter are associated with each other to form an H2L2 molecule in the same manner as normal IgG and form a CD16a-binding domain, and thus cause an antibody activity.

[0043] [3] A CD16a-binding domain is not formed even if the HL molecules against the antigen molecule X or Y are associated with each other en a cell surface to form a homo assembly so that an antibody activity is not caused against a cell expressing only a single antigen molecule.

[0044] Based on the above conception, the present inventors found the following (1) to (3) and thus completed the present invention.

[0045] (1) With respect to the above [1], as shown in FIG. 4, a part or the whole of a hinge domain of an IgG half-molecule is altered so as not to form a disulfide bond between H chains in the hinge domain by substitution or deletion or modification.

[0046] (2) As shown in FIG. 5, CD16a comes into contact with two CH2 domains (in FIG. 5, CH2-A and CH2-B) in Fc at different sites (a region 1 of CH2-A and a region 2 of CH2-B), respectively,

[0047] Therefore, when each of the region 2 of CH2-A and the region 1 of CH2-B that are not used far binding are “disrupted” by alteration or the like of an amino acid to attenuate the binding activity, in a homo assembly of HL molecules having such altered CH2-A, only the region 2 of CH2-A or in a homo assembly of HL molecules having such altered CH2-B, only the region 1 of CH2-B is not present. Therefore, to such a homo assembly, CD16a cannot bind with sufficient affinity.

[0048] On the other hand, according to a combination of HL molecules having such altered CH2-A and altered CH2-B as constituent elements (hetero assembly), an antibody composition satisfying the above conditions [2] and [3] is obtained.

[0049] (3) According to the hetero assembly formed from the IgG half-molecules in which a specific amino acid alteration is introduced into a CD16a-binding domain or another Fc region, an antibody composition having an enhanced effector function for the X/Y double-positive cell and/or exhibiting controlled biokinetics is obtained.

[0050] That is, the present invention relates to the following.

[0051] 1. An antibody composition, which is an antibody composition against a first antigen and a second antigen that are different from each other, including a first IgG half-molecule and a second IgG half-molecule, wherein the following (1A) to (6A) are satisfied:

[0052] (1A) each of the first IgG half-molecule and the second IgG half-molecule is composed of one immunoglobulin light chain (hereinafter abbreviated as chain) and one immunoglobulin heavy chain (hereinafter abbreviated as H chain), and the H chain includes an H chain variable region, a hinge domain, a CH1 domain, a CH2 domain, and a CH3 domain, and has a first Fcγ receptor IIIA (hereinafter CD16a)-binding domain and a second CD16a-binding domain that are different from each other in the CH2 domain,

[0053] (2A) each of the first IgG half-molecule and the second IgG half-molecule includes amino acid residue substitutions of C226A and C229A numbered according to the EU index,

[0054] (3A) the first IgG half-molecule includes an antigen-binding domain that binds to the first antigen, and includes an amino acid residue substitution or D265A numbered according to toe EU index in the first CD16a-binding domain,

[0055] (4A) the second IgG half-molecule includes an antigen-binding domain that binds to the second antigen, and includes an amino acid residue substitution of P329Y numbered according to the EU index in the second CD16a-binding domain,

[0056] (5A) each of the first IgG half-molecule and the second IgG half-molecule includes amino acid residue substitutions of (a) S239D and K326T numbered according to the EU index, or

[0057] each of the first IgG half-molecule and the second IgG half-molecule includes amino acid residue substitutions of (b) S239D, S298A E333A, L242C, and K334C numbered according to the EU index, and

[0058] (6A) at least one of the first IgG half-molecule and the second IgG half-molecule includes an amino acid residue substitution in the CH3 domain as an alteration for attenuating an inter-CH3 domain interaction as compared with an inter-CH3 domain interaction of the IgG1 subclass.

[0059] 2. The antibody composition according to the above 1, wherein the antibody composition exhibits an effector function specifically for a target cell coexpressing the first antigen and the second antigen and damages the target cell as compared with an effector function for a target cell ex pressing only the first antigen and a target cell expressing only the second antigen.

[0060] 3. The antibody composition according to the above 1 or 2, wherein each of the first IgG half-molecule and the second IgG half-molecule includes at least one amino acid residue substitution selected from Y349A, L351A, T366A, L368A, D399A, F405A, Y407A, K409A, and K409R numbered according to the EU index as the alteration for attenuating the inter-CH3 domain interaction as compared with the inter-CH3 domain interaction of the IgG1 subclass.

[0061] 4. The antibody composition according to the above 3, wherein each of the first IgG half-molecule and the second IgG half-molecule includes an amino acid residue substitution of K409R numbered according to the EU index as the alteration for attenuating the inter-CH3 domain interaction as compared with the inter-CH3 domain interaction of the IgG1 subclass.

[0062] 5. The antibody composition according to any one of the above 1 to 4, wherein each of the first IgG half-molecule and the second IgG half-molecule includes the amino acid residue substitutions of (a) S239D and K326T.

[0063] 6. The antibody composition according to any one of the above 1 to 5, wherein

[0064] an H chain constant region (also abbreviated as CH) of the fast IgG half-molecule contains an amino acid sequence represented by SEQ ID NO: 248, and

[0065] a CH of the second IgG half-molecule contains an amino acid sequence represented by SEQ ID NO: 252.

[0066] 7. The antibody composition according to any one of the above 1 to 6, wherein a ratio of sugar chains in which fucose is not bound to N-acetylglucosamine at a reducing end of the sugar chain among the total N-glycoside-linked type sugar chains bound to an Fc region in the first IgG half-molecule and the second IgG half-molecule is 20% or more.

[0067] 8. The antibody composition according to any one of the above 1 to 7, wherein the immunoglobulin subclass of the first IgG half-molecule and the second IgG half-molecule is IgG1.

[0068] 9. A first IgG half-molecule, which is a first IgG half-molecule characterized by being associated with a second IgG half-molecule, wherein the first IgG half-molecule and the second IgG half-molecule satisfy the following (1B) to (7B):

[0069] (1B) the first IgG half-molecule and the second IgG half-molecule form an antibody composition against a first antigen and a second antigen that are different from each other,

[0070] (2B) each of the first IgG half-molecule and the second IgG half-molecule composed of one L chain and one H chain, and the H chain includes an H chain variable region, a hinge, domain, a CH1 domain, a CH2 domain, and a CH3 domain, and has a first CD16a-binding domain and a second CD16a-binding domain that are different from each other in the CH2 domain,

[0071] (3B) each of the first IgG half-molecule and the second IgG half-molecule includes amino acid residue substitutions of C226A and C229A numbered according to the EU index,

[0072] (4B) the first IgG half-molecule includes an antigen-binding domain that binds to the first antigen, and includes an amino acid residue substitution of D265A numbered according to the EU index in the first CD16a-binding domain,

[0073] (5B) the second IgG half-molecule includes an antigen-binding domain that binds to the second antigen, and includes an amino acid residue substitution of P329Y numbered according to the EU index in the second CD16a-binding domain,

[0074] (6B) each of the first IgG half-molecule and the second half-molecule includes amino acid residue substitutions of (a) S239D and K326T numbered according to the EU index, or

[0075] each of the first IgG half -molecule and the second IgG half -molecule includes amino acid residue substitutions of (b) S239D, S298A, E,333A, L242C, and K334C numbered according to the EU index, and

[0076] (7B) at least one of the first IgG half-molecule and the second IgG half-molecule includes an amino acid residue substitution in the CH3 domain as an alteration the attenuating an inter-CH3 domain interaction as compared with an inter-CH3 domain interaction of the IgG1 subclass.

[0077] 10. A second IgG half-molecule, which is a second IgG half-molecule characterized by being associated with a first IgG half-molecule, wherein the first IgG half-molecule and the second IgG half-molecule satisfy the following (1C) to (7C):

[0078] (1C) the first IgG half-molecule and the second IgG half-molecule form an antibody composition against a first antigen and a second antigen that are different from each other,

[0079] (2C) each of the first IgG half-molecule and the second IgG half-molecule is composed of one L chain and one H chain, and the H chain in an H chain variable region, a hinge domain, a CH1 domain, a CH2 domain, and a CH3 domain, and has a first CD16a-binding domain and a second CD16a-binding domain that are different from each other in the CH2 domain,

[0080] (3C) each of the first IgG half-molecule and the second IgG half-molecule includes amino acid residue substitutions of C226A and C229A numbered according to the EU index,

[0081] (4C) the first IgG half-molecule includes an antigen-binding domain that binds to the first antigen, and includes an amino acid residue substitution of D265A numbered according in the EU index in the first CD16a-binding domain,

[0082] (5C) the second IgG half-molecule includes an antigen-binding domain that binds to the second antigen, and includes an ammo acid residue substitution of P329Y numbered according to the EU index in the second CD16a-binding domain,

[0083] (6C) each of the first IgG half-molecule and the second IgG half-molecule includes amino acid residue substitutions of (a) S239D and K326T numbered according to the EU index, or

[0084] each of the first IgG half-molecule and the second IgG half-molecule includes amino acid residue substitutions of (b) S239D, S298A, E333A, L242C, and K334C numbered according to the EU index, and

[0085] (7C) at least one of the first IgG half-molecule and the second IgG half-molecule includes an amino acid residue substitution in the CH3 domain as an alteration for attenuating inter-CH3 domain interaction as compared with an inter-CH3 domain interaction of the IgG1 subclass.

[0086] 11. A DNA encoding the following amino acid sequence a) or b):

[0087] a) an amino acid sequence of the first IgG half-molecule according to the above 9 or

[0088] b) an amino acid sequence of the second IgG half-molecule according to the above 10.

[0089] 12. A recombinant vector, containing at least one of the DNA encoding the amino acid sequence a) and the DNA encoding the amino acid sequence b) according to the above 11.

[0090] 13. A transformant, in which the recombinant vector according to the above 12 is introduced.

[0091] 14. A kit, including the first IgG half-molecule according to the above 9 and the second IgG half-molecule according to the above 10.

[0092] 15. A method for inducing an effector function specifically for a target cell coexpressing the first antigen and the second antigen as compared with an effector function for a target cell expressing only the first antigen and a target cell expressing only the second antigen using the antibody composition according to any one of the above 1 to 8.

[0093] 16. A pharmaceutical composition, containing the antibody compositions according to any one of the above 1 to 8.

[0094] 17. The pharmaceutical composition according to the above 16, for use in a treats; em of a cancer, an autoimmune disease, or an allergic disease.

[0095] 18. Use of the antibody composition according to any one of the above 1 to 8 for producing is pharmaceutical composition fora treatment of a cancer, an autoimmune disease, or an allergic disease.

[0096] 19. Use of the antibody composition according to an one of the above1 to 8 for treating a cancer, an autoimmune disease, or allergic disease.

[0097] 20. The antibody composition according to any one of the above 1 to 8 for use in a treatment of a cancer, an autoimmune disease, or an allergic disease.

[0098] 21. A method for treating a cancer, an autoimmune disease, or an allergic disease, including administering an effective amount of the antibody composition according to any one of the above 1 to 8 to a subject.

[0099] 22. A first IgG half-molecule, which is a first IgG hue-molecule for use in combination with a second IgG half-molecule, wherein the first IgG half-molecule and the second IgG half-molecule satisfy the following (1B) to (7B):

[0100] (1B) the first IgG half-molecule and the second IgG half-molecule form an antibody composition against a first antigen and a second antigen that are different from each other,

[0101] (2B) each of the first IgG half-molecule and the second IgG half-molecule is composed of one L chain and one H chain, and the H chain includes an H chain variable region, a hinge domain, a CH1 domain, a CH2 domain, and a CH3 domain, and has a first CD16a-binding domain and a second CD16a-binding domain that are different from each other in the CH2 domain,

[0102] (3B) each of the first IgG half-molecule and the second IgG half-molecule includes amino acid residue substitutions of C226A and C229A numbered according to the EU index,

[0103] (4B) the first IgG half-molecule includes an antigen-binding domain that binds to the first antigen, and includes an amino acid residue substitution of D265A numbered according to the EU index in the first CD16a-binding domain,

[0104] (5B) the second IgG half-molecule includes an antigen-binding domain that binds to the second antigen, and includes an amino acid residue substitution of P329Y numbered according to the EU index in the second CD16a-binding domain,

[0105] (6B) each of the first IgG half-molecule and the second IgG half-molecule includes amino acid residue substitutions of (a) S239D and K326T numbered according to the EU index, or

[0106] each of the first IgG half-molecule and the second IgG half-molecule includes amino acid residue substitutions of (b) S239D, S298A, E333A, L242C, and K334C numbered according to the EU index, and

[0107] (7B) at least one of the first IgG half-molecule and the second IgG half-molecule includes an amino acid residue substitution in the CH3 domain as an alteration for attenuating an inter-CH3 domain interaction as compared with an inter-CH3 domain interaction of the IgG1 subclass.

[0108] 23. second IgG half-molecule, which is a second IgG half-molecule for use in combination with a first IgG half-molecule, wherein the first IgG half-molecule and the second IgG half-molecule satisfy the following (1C) to (7C):

[0109] (1C) the first IgG half-molecule and the second IgG half-molecule form an antibody composition against a first antigen and a second antigen that are different from each other,

[0110] (2C) each of the first IgG half-molecule and the second IgG half-molecule is composed of one L chain and one chain, and the H chain includes an H chain variable region, a hinge domain, a CH1 domain, a CH2 domain, an a CH3 domain, and has a first CD16a-binding domain and a second CD16a-binding domain that are different from each other in the CH2 domain,

[0111] (3C) each of the first IgG half-molecule and the second IgG half-molecule includes amino acid residue substitutions of C226A and C229A numbered according to the EU index,

[0112] (4C) the first IgG half-molecule includes an antigen-binding domain that binds to the first antigen, and includes an amino acid residue substitution of D265A numbered according to the EU index in the first CD16a-binding domain,

[0113] (5C) the second IgG half-molecule includes an antigen-binding domain that binds to the second antigen, and includes an amino acid residue substitution of P329Y numbered according to the EU index in the second CD16a-binding domain,

[0114] (6C) each of the first IgG half-molecule and the second IgG half-molecule includes amino acid residue substitutions of (a) S239D and K326 T numbered according to the EU index, or

[0115] each of the first IgG half-molecule and the second IgG half-molecule includes amino acid residue substitutions of (b) S239D, S298A, E333A, L242C, and K334C numbered according to the EU index, and

[0116] (7C) at least one of the first IgG half-molecule and the second IgG half-molecule includes an amino acid residue substitution in the CH3 domain as an alteration for attenuating an inter-CH3 domain interaction as compared with an inter-CH3 domain interaction of the IgG1 subclass.

[0117] 24. The first or second IgG half-molecule contained in the antibody composition according to any one of the above 1 to 8.

[0118] 25. A method for inducing an effector function specifically for a double-positive cell expressing the first and second antigens using the IgG half-molecule according to the above 9, 10, or 24.

[0119] 26. The antibody composition according to any one of the above 1 to 8, wherein the first antigen is CADM1 and the second antigen is CCR4.

[0120] 27. The antibody composition according to any one of the above 1 to 8, wherein the first antigen is EGFR and the second antigen is HER2.

[0121] 28. The antibody composition according to any one of the above 1 to 8, wherein the first antigen is CD52 and the second antigen CD70.

[0122] 29. The antibody composition according to any one of the above 1 to 8, wherein the first antigen is CD2 and the second antigen is CD70.

[0123] 30. he antibody composition according to any one of the above 1 to 8, wherein the first antigen is CD19 and the second antigen is CD70.

[0124] 31. The antibody composition according to any one of the above 1 to 8, wherein the first antigen is CD2 and the second antigen is CD40 ligand.

[0125] 32. The antibody composition according to any one of the above 1 to 8, wherein the first antigen is PD-L1 and the second antigen is one selected from CD19, CD30, CCR4, CD20, CD22, and CD79b,

[0126] 33. The antibody composition according to any one of the above 1 to 8, wherein the first antigen is CD8 and the second antigen is CCR4.

[0127] 34. The antibody composition according to any one of the above 1 to 8, wherein the first antigen is CTLA 4 and the second antigen is one selected from CD4, CCR4, and GITR,

[0128] 35. The antibody compost non according to any one of the above 1 to 8, wherein the first antigen is TIGIT and the second antigen is one selected from CD4, CCR4, and GITR.

[0129] 36. The antibody composition according to any one of the above 1 to 8, wherein the first antigen is PD-1 and the second antigen is one selected from CD4, CCR4, and GITR.

[0130] 37. The antibody composition according to any one of the above 1 to 8, wherein the first antigen is OX40 and the second antigen is one selected from CD127, CD26, CD70, and CD15s.

[0131] 38. The antibody composition according to any one of the above 1 to 8, wherein the first antigen is 4-1BB and die second antigen is one selected from CD127, CD26, CD70, and CD15s.

[0132] 39. The antibody composition according to any one of the above 1 to 8, wherein the first antigen is GITR and the second antigen is one selected from CD127, CD26, CD70, and CD15s.

[0133] 40. The antibody composition according to any one of the above 1 to 8, wherein the first antigen is CD40 ligand and the second antigen is one selected from CD127, CD26, CD70, and CD15s.

[0134] 41. The antibody composition according to any one of the above 1 to 8, wherein the first antigen is CD4 arid the second. antigen is CD69.

[0135] 42. A pharmaceutical composition for use in a treatment of ATL, containing the antibody composition according to the above 26.

[0136] 43. A pharmaceutical composition for use in a treatment of at least one of gastric cancer and breast cancer, containing the antibody composition according to the above 27.

[0137] 44. A pharmaceutical composition for use in a treatment of Sjogren's syndrome, containing the antibody composition according to the above 31.

[0138] 45. A pharmaceutical composition for use in a treatment of at least one of lymphoma and leukemia, containing the antibody composition according to the above 32.

[0139] 46. A pharmaceutical composition for use in a treatment of a cancer, containing the antibody composition according to any one of the above 33 to 36.

[0140] 47. A pharmaceutical composition or use in a treatment of an autoimmune disease, containing the antibody composition according to any one of the above 37 to 40.

[0141] 48. A pharmaceutical composition for use in a treatment of ANCA-associated glomerulonephritis, containing the antibody composition according to the above 41.

[0142] 49. Use of the antibody composition according to the above 26 for producing a pharmaceutical composition for treating ATL.

[0143] 50. Use of the antibody composition according to the above 27 for producing a pharmaceutical composition for treating at least one of gastric cancer and breast cancer.

[0144] 51. Use of the antibody composition according to the above 31 for producing a pharmaceutical composition for treating Sjogren's syndrome,

[0145] 52. Use of the antibody composition according to the above 32 for producing a pharmaceutical composition for treating at least one of lymphoma and leukemia.

[0146] 53. Use of the antibody composition according to any one of the above 33 to 36 for producing a pharmaceutical composition for treating a cancer.

[0147] 54. Use of the antibody composition according to any one of the above 37 to 40 for producing a pharmaceutical composition for treating an autoimmune disease.

[0148] 55. Use of the antibody composition according to the above 41 for producing a pharmaceutical composition for treating ANCA-associated glomerulonephritis.

[0149] 56. Use of the antibody composition according to the above 26 for treating ATL.

[0150] 57. Use of the antibody composition according to the above 27 for treating at least one of gastric cancer and breast cancer.

[0151] 58. Use of the antibody composition according to the above 31 for treating Sjogren's syndrome.

[0152] 59. Use of the antibody composition according to the above 32 for treating at least one of lymphoma and leukemia.

[0153] 60. Use of the antibody composition according to any one of the above 33 to 36 for treating a cancer.

[0154] 61. Use of the antibody composition according to any one of the above 37 to 40 for treating an autoimmune disease.

[0155] 62. Use of the antibody composition according to the above 41 for treating ANCA-associated glomerulonephritis.

[0156] 63. The antibody composition according to the above 26 for use in a treatment of ATL.

[0157] 64. The antibody composition according to the above 27 for use in a treatment of at least one of gastric cancer and breast cancer.

[0158] 65. The antibody composition according to the above 31 for use in a treatment of Sjogren's syndrome.

[0159] 66. The antibody composition according to the above 32 for use in a treatment of at least one of lymphoma and leukemia.

[0160] 67. The antibody composition according to any one of the above 33 to 36 for use in a treatment of a cancer.

[0161] 68. The antibody composition according to any one of the above 37 to 40 for use in a treatment of an autoimmune disease.

[0162] 69. The antibody composition according to the above 41 for use in a treatment of ANCA-associated glomerulonephritis.

[0163] 70. A method for treating ATL, including administering an effective amount of the antibody composition according to the above 26 to a subject.

[0164] 71. A method for treating at least one of gastric cancer and breast cancer, including administering an effective amount of the antibody composition according to the above 27 to a subject.

[0165] 72. A method for treating Sjogren's syndrome, including administering an effective amount of the antibody composition according to the above 31 to a subject.

[0166] 73. A method for treating at least one of lymphoma and leukemia, including administering an effective amount of the antibody composition according to the above 32 to a subject.

[0167] 74. A method for treating a cancer, including administering an effective amount of the antibody composition according to any one of the above 33 to 36 to a subject.

[0168] 75. A method for treating an autoimmune disease, including administering an effective amount of the antibody composition according to any one of the above 37 to 40 to a subject.

[0169] 76. A method for treating ANCA-associated glomerulonephritis, including administering an effective amount of the antibody composition according to the above 41 to a subject.

[0170] 77. The antibody composition according to any one of the above 1 to 8, wherein the first antigen is PD-1 and the second antigen is CD3.

[0171] 78. The antibody composition according to any one of the above 1 to 8, wherein the first antigen is PD-1 and the second antigen is CD4.

[0172] 79. The antibody composition according to any one of the above 1 to 8, wherein the first antigen is integrin α4β7 and the second antigen is one selected from CCR6, CXCR3, CD161, and CD127.

[0173] 80. The antibody composition according to any one of the above 1 to 8, wherein the first antigen is integrin α4β7 and the second antigen is CD40 ligand.

[0174] 81. The antibody composition according to any one of the above 1 to 8, wherein the first antigen is integrin α4β1 and the second antigen is CD40 ligand.

[0175] 82. The antibody composition according to any one of the above 1 to 8, wherein the first antigen is CXCR5 and the second antigen is CD127.

[0176] 83. The antibody composition according to any one of the above 1 to 8, wherein the first antigen is a TPO receptor (c-mpl) and the second antigen is CD34 or CD123.

[0177] 84. The antibody composition according to any one of the above 1 to 8, wherein the first antigen is CXCR3 and the second antigen is CD3.

[0178] 85. The antibody composition according to any one of the above 1 to 8, wherein the first antigen is CXCR3 and the second antigen is CD127 or CD40 ligand.

[0179] 86. The antibody composition according to any one of the above 1 to 8, wherein the first antigen is CCR4 and the second antigen is CD127 or CD40 ligand.

[0180] 87. The antibody composition according to any one of the above 1 to 8, wherein the first antigen is CCR6 and the second antigen is CD127 or CD40 ligand.

[0181] 88. The antibody composition according to any one of the above 1 to 8, wherein the first antigen is CRTH2 and the second antigen is CD127 or CD40 ligand.

[0182] 89. The antibody composition according to any one of the above 1 to 8, wherein the first antigen is CRTH2 and the second antigen is CCR4.

[0183] 90. The antibody composition according to any one of the above 1 to 8, wherein the first antigen is CRTH2 and the second antigen is ST2.

[0184] 91. The antibody composition according to any one of the above 1 to 8, wherein the first antigen is CRTH2 and the second antigen CCR6 or CCR3.

[0185] 92. The antibody composition according to any one of the above 1 to 8, wherein the first antigen is CD207 and the second antigen is CD11b or CD1a.

[0186] 93. The antibody composition according to any one of the above 1 to 8, wherein the first antigen is CD123 and the second antigen is HLA-DR or ASCT2.

[0187] 94. The antibody composition according to any one of the above 1 to 8, wherein the first antigen is CSF1R and the second antigen is CD14.

[0188] 95. The antibody composition according to any one of the above 1 to 8, wherein the first antigen is CSF1R and the second antigen CD33.

[0189] 96. The antibody composition according to any one of the above 1 to 8, wherein the first antigen is CD19 and the second antigen is CD38.

[0190] 97. The antibody composition according to any one of the above 1 to 8, wherein the first antigen is CD3 and the second antigen is IL-23R.

[0191] 98. The antibody composition according to any one of the above 1 to 8, wherein the first antigen is CD3 and the second antigen is CX3CR1.

[0192] 99. The antibody composition according to any one of the above 1 to 8, wherein the first antigen is CXCR4 and the second antigen is type 1 collagen.

[0193] 100. The antibody composition according to any one of the above 1 to 8, wherein the first antigen is CXCR4 and the second antigen is CD14.

[0194] 101. The antibody composition according to any one of the above 1 to 8, wherein the first antigen is CXCR4 and the second antigen is CD16.

[0195] 102. The antibody composition according to any one of the above 1 to 8, wherein the first antigen is CLEC10A and the second antigen is CD14 or CD16.

[0196] 103. The antibody composition according to any one of the above 1 to 8, wherein the first antigen is CD70 and the second antigen is CD38.

[0197] 104. The antibody composition according to any one of the above 1 to 8, wherein the first antigen is CD70 and the second antigen is one selected from CD4, CD127, and TIM-1.

[0198] 105. The antibody composition according to any one of the above 1 to 8, wherein the first antigen is CD4 and the second antigen is TIM-1.

[0199] 106. The antibody composition according to any one of the above 1 to 8, wherein the first antigen is CD70 and the second antigen is CD52.

[0200] 107. The antibody composition according to any one of the above 1 to 8, wherein the first antigen is CB1 and the second antigen is AT1R.

[0201] 108. The antibody composition according to any one of the above 1 to 8, wherein the first antigen is CD4 or PD-1 and the second antigen is CD153.

[0202] 109. The antibody composition according to any one of the above 1 to 8, wherein the first antigen is FcεRI and the second antigen is CD34 or C-KIT.

[0203] 110. The antibody composition according to any one of the above 1 to 8, wherein the first antigen is CD34 and the second antigen is CD203 MRGPRX2.

[0204] 111. The antibody composition according to any one of the above 1 to 8, wherein the first antigen is CD52 and the second antigen is CD127.

[0205] 112. The antibody composition according to any one of the above 1 to 8, wherein the first antigen is CD69 and the second antigen is CD21.

[0206] 113. The antibody composition according to any one of the above 1 to 8, wherein the first antigen is CD106 and the second antigen is one selected from CD11c, CD19, CD 21, and CD 72.

[0207] 114. The antibody composition according to any one of the above 1 to 8, wherein the tint antigen is 4-1BS and the second antigen is one selected from CD11c, CD19, CD21, and CD72.

[0208] 115. The antibody composition according to any one of the above 1 to 8, wherein the first antigen is BLT1 and the second antigen is CD49b.

[0209] 116. The antibody composition according to any one of the above 1 to 8, wherein the first antigen is CD226 and the second antigen is CD8.

[0210] 117. The antibody composition according to any one of the above 1 to 8, wherein the first antigen is CXCR3 and the second antigen is one selected from CD8, CD49a, IL-15R, and NKG2D.

[0211] 118. The antibody composition according to any one of the above 1 to 8, wherein the first antigen is CD49a and the. second antigen is one selected from CD8, IL-15R, and NKG2 D.

[0212] 119. The antibody composition according to any one of the above 1 to 8, wherein the first antigen is IL-15R and the second antigen is CD8, or NKG2D.

[0213] 120. The antibody composition according to any one of the above 1 to 8, wherein the first antigen is NIKG2D and the second antigen is CD8.

[0214] 121. The antibody composition according to any one of the above 1 to 8, wherein the first antigen s CD177 and the, second antigen is PR3.

[0215] 122. The antibody composition according to any one of the above 1 to 8, wherein the first antigen is CD4 and the second antigen is CD127.

[0216] 123. The antibody composition according to any one of the above 1 to 8, wherein the first antigen is CD40 ligand mind the second antigen is IL-6.

[0217] 124. The antibody composition according to any one of the above 1 to 8, wherein the first antigen, is IL-17R and the second antigen is membrane-associated TNF.

[0218] 125. The antibody composition according to any one of the above 1 to 8, wherein the first antigen is IL-23R and the second antigen is membrane-associated CCR6.

[0219] 126. Use of the antibody composition according to the above 77 for producing a pharmaceutical composition for treating rheumatoid arthritis.

[0220] 127. Use of the antibody composition according to the above 78 for producing a pharmaceutical composition for treating celiac disease.

[0221] 128. Use of the antibody composition according to the above 79 for producing a pharmaceutical composition for treating an inflammatory bowel disease.

[0222] 129. Use of the antibody composition according to the above 80 for producing a pharmaceutical composition for treating at least one of multiple sclerosis and an inflammatory bowel disease.

[0223] 130. Use of the antibody composition according to the above 81 for producing a pharmaceutical composition for treating at least one of multiple sclerosis and an inflammatory bowel disease.

[0224] 131. Use of the antibody composition according to the above 82 for producing a pharmaceutical composition for treating an allergic disease.

[0225] 132. Use of the antibody composition according to the above 83 for producing a pharmaceutical composition for treating primary myelofibrosis.

[0226] 133. Use of the antibody composition according to the above 84 for producing a pharmaceutical composition for treating at least one selected from an autoimmune disease, arteriosclerosis, and an ischemic heart disease.

[0227] 134. Use of the antibody composition according to the above 85 for producing a pharmaceutical composition for treating systemic lupus erythematosus.

[0228] 135. Use of the antibody composition according to the above 86 for producing a pharmaceutical composition for treating an allergic disease.

[0229] 136. Use of the antibody composition according to the above 87 for producing a pharmaceutical composition for treating psoriasis.

[0230] 137. Use of the antibody composition according to the above 88 for producing a pharmaceutical composition for treating an allergic disease.

[0231] 138. Use of the antibody composition according to the above 89 for producing a pharmaceutical composition for treating at least one selected from asthma, eosinophilic sinusitis, and atopic dermatitis.

[0232] 139. Use of the antibody composition according to the above 90 for producing a pharmaceutical composition for treating at least one of asthma and eosinophilic sinusitis.

[0233] 140. Use of the antibody composition according to the above 91 for producing a pharmaceutical composition for treating an allergic disease.

[0234] 141. Use of the antibody composition according to the above 92 for producing a pharmaceutical composition for treating langerhans cell histiocytosis (LCH).

[0235] 142. Use of the antibody composition according to the above 93 for producing a pharmaceutical composition for treating systemic lupus erythematosus.

[0236] 143. Use of the antibody composition according to the above 94 for producing a pharmaceutical composition for treating idiopathic pulmonary fibrosis.

[0237] 144. Use of the antibody composition according to the above 95 for producing a pharmaceutical composition for treating a cancer.

[0238] 145. Use of the antibody composition according to the above 96 or 97 for producing a pharmaceutical composition for treating systemic lupus erythematosus.

[0239] 146. Use of the antibody composition according to the above 98 for producing a pharmaceutical composition for treating at least one selected from an autoimmune disease, arteriosclerosis, and an ischemic heart disease.

[0240] 147. Use of the antibody composition according to the above 99 for producing a pharmaceutical composition for treating at least one selected from various fibrotic diseases such as idiopathic pulmonary fibrosis, systemic sclerosis, and hepatic cirrhosis.

[0241] 148. Use of the antibody composition according to the above 100 for producing a pharmaceutical composition for treating idiopathic pulmonary fibrosis.

[0242] 149. Use of the antibody composition according to the above 101 for producing a pharmaceutical composition for treating at least one selected from neutrophilic asthma, chromic obstructive pulmonary disease, and Alzheimer's disease.

[0243] 150. Use of the antibody composition according to the above 102 for producing a pharmaceutical composition for treating at least one selected from Crohn's disease, rheumatoid arthritis, and asthma.

[0244] 151. Use of the antibody composition according to the above 103 for producing pharmaceutical composition for treating at least one of multiple sclerosis and neuromyelitis optica.

[0245] 152. Use of the antibody composition according to the above 104 or 105 for producing a pharmaceutical composition for treating systemic lupus erythematosus.

[0246] 153. Use of the antibody composition according to the above 106 or producing a pharmaceutical composition for treating multiple sclerosis.

[0247] 154. Use of the antibody composition according to the above 107 for producing a pharmaceutical composition for treating hepatic cirrhosis.

[0248] 155. Use of the antibody composition according to the above 108 for producing a pharmaceutical composition for treating systemic lupus erythematosus.

[0249] 156. Use of the antibody composition according to the above 109 for producing a pharmaceutical composition for treating a mast cell activation syndrome (MCAS) including at least one selected from urticaria, a food allergy, and mastocytosis.

[0250] 157. Use of the antibody composition according to the above 110 for producing a pharmaceutical composition for treating a mast cell activation syndrome (MCAS) including at least one selected from urticaria, a food allergy, and mastocytosis.

[0251] 158. Use of the antibody composition according to the above 111 for producing a pharmaceutical composition tor treating multiple sclerosis.

[0252] 159. Use of the antibody composition according to the above 112 for producing a pharmaceutical composition for treating at least one selected from multiple sclerosis, type 1 diabetes mellitus, and rheumatoid arthritis.

[0253] 160. Use of the antibody composition according to the above 113 for producing a pharmaceutical composition for treating at least one selected from secondary progressive multiple sclerosis (SPMS), rheumatoid arthritis for which anti-TNF therapy is not effective, transplantation, and systemic lupus erythematosus.

[0254] 161. Use of the antibody composition according to the above 114 for producing a pharmaceutical composition for treating at least one selected from secondary progressive multiple sclerosis (SPMS), rheumatoid arthritis for which anti-TNF therapy is not effective, transplantation, and systemic lupus erythematosus.

[0255] 162. Use of the antibody composition according to the above 115 for producing a pharmaceutical composition for treating asthma.

[0256] 163. Use of the antibody composition according to the above 116 for producing a pharmaceutical composition for treating systemic scleroderma.

[0257] 164. Use of the antibody composition according to the above 117 for producing a pharmaceutical composition for treating at least one of vitiligo and psoriasis.

[0258] 165. Use of the antibody composition according to the above for pharmaceutical composition for treating at least one of vitiligo and psoriasis.

[0259] 166. Use of the antibody composition according to the above 119 for producing a pharmaceutical composition for treating at least one of vitiligo and psoriasis.

[0260] 167. Use of the antibody composition according to the above 120 for producing a pharmaceutical composition for treating at least one of vitiligo and psoriasis.

[0261] 168. Use of the antibody composition according to the above 121 for producing a pharmaceutical composition for treating at least one of ANCA (antineutrophil cytoplasmic antibody)-associated vasculitis and systemic lupus erythematosus.

[0262] 169. Use of the antibody composition according to the above 122 for producing a pharmaceutical composition for treating a cell-dependent immune-related disease.

[0263] 170. Use of the antibody composition according to the above 123 for producing a pharmaceutical composition for treating an immune-related disease.

[0264] 171. Use of the antibody composition according to the above 124 for producing a pharmaceutical composition tor treating psoriatic arthritis.

[0265] 172. Use of the antibody composition according to the above 125 for producing a pharmaceutical composition for treating a autoimmune disease including at least one of Sjogren's syndrome and psoriasis.

[0266] 173. Use of the antibody composition according to the above 77 for treating rheumatoid arthritis.

[0267] 174. Use of the antibody composition is according to the above 78 for treating celiac disease.

[0268] 175. Use of the antibody composition according to the above 79 for treating an inflammatory bowel disease.

[0269] 176. Use of the antibody composition according to the above 80 for treating at least one of multiple sclerosis and an inflammatory bowel disease.

[0270] 177. Use of the antibody composition according to the above 81 tor treating at least one of multiple sclerosis, and an inflammatory bowel disease.

[0271] 178. Use of the antibody composition according to the above 82 for treating an allergic disease.

[0272] 179. Use of the antibody composition according to the above 83 the treating primary myelofibrosis.

[0273] 180. Use of the antibody composition according to the above 84 for treating at least one selected from an autoimmune disease, arteriosclerosis, and an ischemic heart disease.

[0274] 181. Use of the antibody composition according to the above 85 for treating systemic lupus erythematosus.

[0275] 182. Use of the antibody composition according to the above 86 for treating an allergic disease.

[0276] 183. Use of the antibody composition according to the above 87 for treating psoriasis.

[0277] 184. Use of the antibody composition according to the above 88 for treating an allergic disease.

[0278] 185. Use of the antibody composition according to the above 89 for treating at least one ticketed from asthma, eosinophilic sinusitis, and atopic dermatitis.

[0279] 186. Use of the antibody composition according to the above 90 for treating at least one of asthma and eosinophilic sinusitis.

[0280] 187. Use of the antibody composition according to the above 91 for treating an allergic disease.

[0281] 188. Use of the antibody composition according to the above 92 for treating langerhans cell histiocytosis (LCH).

[0282] 189. Use of the antibody composition according to the above 93 for treating systemic lupus erythematosus.

[0283] 190. Use of the antibody composition according to the above 94 for treating idiopathic pulmonary fibrosis.

[0284] 191. Use of the antibody composition according to the above 95 for treating a cancer.

[0285] 192. Use of the antibody composition according to the above 96 or 97 for treating systemic lupus erythematosus.

[0286] 193. Use of the antibody composition according to the above 98 for treating at least one selected from an autoimmune disease, arteriosclerosis, and an ischemic heart disease.

[0287] 194. Use of the antibody composition according to the above 99 for treating a fibrotic disease including at least one selected from idiopathic pulmonary fibrosis, systemic sclerosis, and hepatic cirrhosis.

[0288] 195. Use of the antibody composition according to the above 100 for treating idiopathic pulmonary fibrosis.

[0289] 196. Use of the antibody composition according to the above 101 for treating at least one selected from neutrophilic asthma, chrome obstructive pulmonary disease, and Alzheimer's disease.

[0290] 197. Use of the antibody composition according to the above 102 for treating at least one selected from Crohn's disease, rheumatoid arthritis, and asthma.

[0291] 198. Use of the antibody composition according to the above 103 for treating at least one of multiple sclerosis and neuromyelitis optica.

[0292] 199. Use of the antibody composition according to the above 104 or 105 for treating systemic lupus erythematosus.

[0293] 200. Use of the antibody composition according to the above 106 for treating multiple sclerosis.

[0294] 201. Use of the antibody composition according to the above 107 for treating hepatic cirrhosis.

[0295] 202. Use of the antibody composition according to the above 108 for treating systemic lupus erythematosus.

[0296] 203. Use of the antibody composition according to the above 109 for treating a mast cell activation syndrome (MCAS) including at least one selected from urticaria, a food allergy, and mastocytosis.

[0297] 204. Use of the antibody composition according to the above 110 for treating a mast cell activation syndrome (MCAS) including at least one selected from urticaria, a food allergy, and mastocytosis.

[0298] 205. Use of the antibody composition according to the above 111 for treating multiple sclerosis.

[0299] 206. Use of the antibody composition according to the above 112 tor treating at least one selected from multiple sclerosis, type 1 diabetes mellitus, and rheumatoid arthritis.

[0300] 207. Use of the antibody composition according to the above 113 for treating at least one selected from secondary progressive multiple sclerosis (SPMS), rheumatoid arthritis for which anti-TNF therapy is not effective, transplantation, and systemic lupus erythematosus.

[0301] 208. Use of the antibody composition according to the above 114 for treating at least one selected from secondary progressive multiple sclerosis (SPMS) rheumatoid arthritis for which anti-TNF therapy is not effective, transplantation, and systemic lupus erythematosus.

[0302] 209. Use of the antibody composition according the above 115 for treating asthma.

[0303] 210. Use of the antibody composition according to the above 116 for treating systemic scleroderma.

[0304] 211. Use of the antibody composition according to the above 117 tor treating at least one of vitiligo and psoriasis.

[0305] 212. Use of the antibody composition according to the above 118 for treating at least one of vitiligo and psoriasis.

[0306] 213. Use of the antibody composition according to the above 119 for treating at least one of vitiligo and psoriasis.

[0307] 214. Use of the antibody composition according to the above 120 for treating at least one of vitiligo and psoriasis.

[0308] 215. Use of the antibody composition according to the above 121 for treating at least one of ANCA-associated vasculitis and systemic lupus erythematosus.

[0309] 216. Use of the antibody composition according to the above 122 for treating a T cell-dependent immune-related disease.

[0310] 217. Use of the antibody composition according to the above 123 for treating an immune-related disease.

[0311] 218. Use of the antibody composition according to the above 124 for treating psoriatic arthritis.

[0312] 219. Use of the antibody composition according to the above 125 for treating an autoimmune disease including at least one of Sjogren's syndrome and psoriasis.

[0313] 220. The antibody composition according to the above 77 for use in a treatment of rheumatoid arthritis.

[0314] 221. The antibody composition according to the above 78 for use in a treatment of celiac disease.

[0315] 222. The antibody composition according to the above 79 for use in a treatment of an inflammatory bowel disease.

[0316] 223. The. antibody composition according to the above 80 for use in a treatment of at least one of multiple sclerosis and an inflammatory bowel disease.

[0317] 224. The antibody composition according to the above 81 for use in a treatment of at least one of multiple sclerosis and an inflammatory bowel disease.

[0318] 225. The antibody composition according to the above 82 for use in a treatment of an allergic disease.

[0319] 226. The antibody composition according to the above 83 for use in a treatment of primary myelofibrosis.

[0320] 227. The antibody composition according to the above 84 for use in a treatment of at least one selected from an autoimmune disease, arteriosclerosis, and an ischemic heart disease.

[0321] 228. The antibody composition according to the above 85 for use in a treatment of systemic lupus erythematosus.

[0322] 229. The antibody composition according to the above 86 for use in a treatment of an allergic disease.

[0323] 230. The antibody composition according to the above 87 for use in a treatment of psoriasis.

[0324] 231. The antibody composition according to the above 88 for use in a treatment of an allergic disease.

[0325] 232. The antibody composition according to the above 89 for use in a treatment of at least one selected from asthma, eosinophilic sinusitis, and atopic dermatitis.

[0326] 233. The antibody composition according to the above 90 for use in a treatment of at least one of asthma and eosinophilic sinusitis.

[0327] 234. The antibody composition according to the above 91 for use in a treatment of an allergic disease.

[0328] 235. The antibody composition a:cording to the above 92 for use in a treatment of langerhans cell histiocytosis (LCH).

[0329] 236. The antibody composition according to the above 93 for use in a treatment of systemic lupus erythematosus.

[0330] 237. The antibody composition according to the above 94 for use in a treatment of idiopathic pulmonary fibrosis.

[0331] 238. me antibody composition according to the above 95 for use in a treatment of a cancer.

[0332] 239. The antibody composition according to the above 96 or 97 for use in a treatment of systemic lupus erythematosus.

[0333] 240. The antibody composition according to the above 98 for use in a treatment of at least one selected front an autoimmune disease, arteriosclerosis, and an ischemic heart disease.

[0334] 241. The antibody composition according to the above 99 for use in a treatment of a fibrotic disease including at least one selected from idiopathic pulmonary fibrosis, systemic sclerosis, and hepatic cirrhosis.

[0335] 242. The antibody composition according o the above 100 for use in a treatment of idiopathic pulmonary fibrosis.

[0336] 243. The antibody composition according to the above 101 for use in a treatment of at least one selected from neutrophilic asthma, chronic obstructive pulmonary disease, and Alzheimer's disease.

[0337] 244. The antibody composition according to the above 102 for use in a treatment of at least one selected from Crohn's disease, rheumatoid arthritis, and asthma.

[0338] 245. The antibody composition according to the above 103 for use in a treatment of at least one of multiple sclerosis and neuromyelitis optics.

[0339] 246. The antibody composition according to the above 104 or 105 for use in a treatment of systemic lupus erythematosus.

[0340] 247. The antibody composition according to the above 106 for use in a treatment of multiple sclerosis.

[0341] 248. The antibody composition according to the above 107 for use in a treatment of hepatic cirrhosis.

[0342] 249. The antibody composition according to the above 108 for use in a treatment of systemic lupus erythematosus.

[0343] 250. The antibody composition according to the above 109 for use in a treatment of a mast cell activation syndrome (MCAS) including at least one selected from urticaria, a food allergy, and mastocytosis.

[0344] 251. The antibody composition according to the above 110 for use in a treatment of a mast cell activation syndrome (MCAS) including at least one selected from urticaria, a food allergy, and mastocytosis.

[0345] 252. The antibody composition according to the above 111 for use in a treatment of multiple sclerosis.

[0346] 253. The antibody composition according to the above 112 for use in a treatment of at least one selected from multiple sclerosis, type 1 diabetes mellitus, and rheumatoid arthritis.

[0347] 254. The antibody composition according to the above 113 for use in a treatment of at least one selected from secondary progressive multiple sclerosis (SPMS), rheumatoid arthritis for which anti-TNF therapy is not effective, transplantation, and systemic lupus erythematosus.

[0348] 255. The antibody composition according to the above 114 for use in a treatment of at least one selected from secondary progressive multiple sclerosis (SPMS), rheumatoid arthritis for winch anti-TNF therapy is not effective, transplantation, and systemic lupus erythematosus.

[0349] 256. The antibody composition according to the above 115 for use in a treatment of asthma.

[0350] 257. The antibody composition according to the above 116 for use in a treatment of systemic scleroderma.

[0351] 258. The antibody composition according to the above 117 for use in a treatment of at least one of vitiligo and psoriasis.

[0352] 259. The antibody composition according to the above 118 for use in a treatment of at least one of vitiligo and psoriasis.

[0353] 260. The antibody composition according to the above 119 tin use in a treatment of at least one of vitiligo and psoriasis.

[0354] 261. The antibody composition according to the above 120 for use in a treatment of at least one of vitiligo and psoriasis.

[0355] 262. The antibody composition according to the above 121 for use in a treatment of at least one of ANCA-associated vasculitis and systemic lupus erythematosus.

[0356] 263. The antibody composition according to the above 122 for use in a treatment of a T cell-dependent immune-related disease.

[0357] 264. The antibody composition according to the above 123 for use in a treatment of an immune-related disease.

[0358] 265. The antibody composition according to the above 124 for use in a treatment of psoriatic arthritis.

[0359] 266. The antibody composition according to the above 125 for use in a treatment of an autoimmune disease including at least one of Sjogren's syndrome and psoriasis.

[0360] 267. A method for treating rheumatoid arthritis, including administering an effective amount of the antibody composition according to the above 77 to a subject.

[0361] 268. A method fir treating celiac disease, including administering an effective amount of the antibody composition according to the above 78 to a subject.

[0362] 269. A method for treating an inflammatory bowel disease, including administering an effective amount of the antibody composition according to the above 79 to a subject.

[0363] 270. A method for treating at least one of multiple sclerosis and an inflammatory bowel disease, including administering an effective amount of the antibody composition according to the above 80 to a subject.

[0364] 271. A method for treating at least one of multiple sclerosis and an inflammatory bowel disease, including administering an effective amount of the antibody composition according to the above 81 to a subject.

[0365] 272. A method for treating an allergic disease, including administering an effective amount of the antibody composition according to the above 82 to a subject.

[0366] 273. A method for treating primary myelofibrosis, including administering an effective amount of the antibody composition according to the above 83 to a subject.

[0367] 274. A method for treating at least one selected from an autoimmune disease, arteriosclerosis, and an ischemic heart disease, including administering an effective amount of the antibody composition according to the above 84 to a subject.

[0368] 275. A method for treating systemic lupus erythematosus, including administering an effective amount of the antibody composition according to the above 85 to a subject.

[0369] 276. A method for treating an allergic disease, including administering an effective amount of the antibody composition according to the above 86 to a subject.

[0370] 277. A method for treating psoriasis, including administering an effective amount of the antibody composition according to the above 87 to a subject.

[0371] 278. A method for treating an allergic disease, including administering an effective amount of the antibody composition according to the above 88 to a subject.

[0372] 279. A method for treating at least one selected from asthma, eosinophilic sinusitis, and atopic dermatitis, including administering an effective amount of the antibody composition according to the above 89 to a subject.

[0373] 280. A method for treating at least one of asthma and eosinophilic sinusitis, including administering an effective amount of the antibody composition according to the above 90 to a subject.

[0374] 281. toe production of a pharmaceutical composition for treating an allergic disease, including administering an effective amount of the antibody composition according to the above 91 to a subject.

[0375] 282. A method the treating langerhans cell histiocytosis (LCH), including administering an effective amount of the antibody composition according to the above 92 to a subject.

[0376] 283. A method for treating systemic lupus erythematosus, including administering an effective amount of the antibody composition according to the above 93 to a subject.

[0377] 284. A method for treating idiopathic pulmonary fibrosis, including administering an effective amount of the antibody composition according to the above 94 to a subject.

[0378] 285. A method for treating a cancer, including administering an effective amount of the antibody composition according to the above 95 to a subject.

[0379] 286. A method for treating systemic lupus erythematosus, including administering an effective amount of the antibody composition according to the above 96 or 97 to a subject.

[0380] 287. A method for treating at least one selected from an autoimmune disease, arteriosclerosis, and an ischemic heart disease, including administering an of amount of the antibody composition according to the above 98 to a subject.

[0381] 288. A method for treating a fibrotic disease including at least one selected from idiopathic pulmonary fibrosis, systemic sclerosis, and hepatic cirrhosis, including administering an effective amount of the antibody composition according to the above 99 to a subject.

[0382] 289. A method for treating idiopathic pulmonary fibrosis, including administering an effective amount of the antibody composition according to the above 100 to a subject.

[0383] 290. A method for treating at least one selected from neutrophilic asthma, chronic obstructive pulmonary disease, and Alzheimer's disease, including administering an effective amount of the antibody composition according to the above 101 to a subject.

[0384] 291. A method for treating at least one selected from Crohn's disease, rheumatoid arthritis, and asthma, including administering an effective amount of the antibody composition according to the above 102 to a subject.

[0385] 292. A method for treating at least one of multiple sclerosis and neuromyelitis optics, using the antibody composition according to the above 103.

[0386] 293. A method for treating systemic lupus erythematosus, including administering an effective amount of the antibody composition according to the above 104 or 105 to a subject.

[0387] 294. A method for treating multiple sclerosis, including administering an effective amt um of the antibody composition according to the above 106 to a subject.

[0388] 295. A method for treating hepatic cirrhosis, including administering an effective amount of the antibody composition according to the above 107 to a subject.

[0389] 296. A method or treating systemic lupus erythematosus, including administering an effective amount of the antibody composition according to the above 108 to a subject.

[0390] 297. A method for treating a mast cell activation syndrome (MCAS) including at least one selected from urticaria, a food allergy and mastocytosis, including administering an effective amount of the antibody composition according to the above 109 to a subject.

[0391] 298. A method for treating a mast cell activation syndrome (MCAS) including at least one selected from urticaria, a food allergy, and mastocytosis, including administering an effective amount of the antibody composition according to the above 110 to a subject.

[0392] 299. A method for treating multiple sclerosis, including administering an effective amount of the antibody composition according to the above 111 to a subject.

[0393] 300. A method for treating at least one selected from multiple sclerosis, type 1 diabetes mellitus, and rheumatoid arthritis including administering an effective amount of the antibody composition according to the above 112 to a subject.

[0394] 301. A method for treating at least one selected secondary progressive multiple sclerosis (SPMS), rheumatoid arthritis for which anti-TNF therapy is not effective, transplantation, and systemic lupus erythematosus, including administering an effective amount of the antibody composition according to the above 113 to a subject.

[0395] 302. A method for treating at least one selected from secondary progressive multiple sclerosis (SPMS), rheumatoid arthritis for which anti-TNF therapy is not effective, transplantation, and systemic lupus erythematosus, including administering an effective amount of the antibody composition according to the above 114 to a subject.

[0396] 303. A method for treating asthma, including administering an effective amount of the antibody composition according to the above 115 to a subject.

[0397] 304. A method for treating systemic scleroderma, including administering an effective amount of the antibody composition according to the above 116 to a subject.

[0398] 305, A method for treating at least one of vitiligo and psoriasis, including administering an effective amount of the antibody composition according to the above 117 to a subject.

[0399] 306. A method for treating at least one of vitiligo and psoriasis, including administering an effective amount of the antibody composition according to the above 118 to a subject.

[0400] 307. A method for treating at least one of vitiligo and psoriasis, including administering an effective amount of the antibody composition according to the above 119 to a subject.

[0401] 308. A method for treating at least one of vitiligo and psoriasis, including administering an effective amount of the antibody composition according to the above 120 to a subject.

[0402] 309. A method for treating et least one of ANCA-associated vasculitis and systemic lupus erythematosus, including administering an effective amount of the antibody composition according to the above 121 to a subject.

[0403] 310. A method for treating a T cell-dependent immune-related disease, including administering an effective amount of the antibody composition according to the above 122 to a subject.

[0404] 311. A method for treating an immune-related disease, including administering an effective amount of the antibody composition according to the above 123 to a subject.

[0405] 312. A method for treating psortatic arthritis, including administering an effective amount of the antibody composition according to the above 124 to a subject.

[0406] 313. A method for treating an autoimmune disease including at least one of Sjogren's syndrome and psoriasis, including administering an effective amount of the antibody composition according to the above 125 to a subject.

[0407] 314. The antibody composition according to any one of the above 1 to 8, wherein the first antigen is CD64 and the second antigen is one selected born CD206, CD163, and CD68.

[0408] 315. The antibody composition according to any one of the above 1 to 8, wherein the first antigen is CD163 and the second antigen is CD206 or CD68.

[0409] 316. The antibody composition according to any one of the above 1 to 8, wherein the first antigen is CD206 and the second antigen is CD68.

[0410] 317. The antibody composition according to any one of the above 1 to 8, wherein the first antigen is CD14 and the second antigen is one selected from CD48, CD84, CD97, and CD305.

[0411] 318. The antibody composition according to any one of the above 1 to 8, wherein the first antigen is CD15 and the second antigen is one selected from CD48, CD84, CD97, and CD305.

[0412] 119. The antibody composition according to any one of the above 1 to 8, wherein the first antigen is CD33 and the second antigen is one selected from CD48, CD84, CD97, and CD305.

[0413] 320. The antibody composition according to my one of the above 1 to 8, wherein the first antigen is CD11b and the second antigen is one selected front CD48, CD84, CD97, and CD305.

[0414] 321. The antibody composition according to any one of the above 1 to 8, wherein the first antigen is CCR4 and the second antigen is one selected from CADM1, CD 30, and CD70.

[0415] 322. The antibody composition according to any one of the above 1 to 8, wherein the first antigen is CD38 and the second antigen is CD138 or BCMA.

[0416] 323. The antibody composition according to any one of the above 1 to 8, wherein the first antigen is BCMA and the second antigen is CD56 or CS1.

[0417] 324. The antibody composition according to any one of the above 1 to 8, wherein the first antigen is CD40 ligand and the second antigen is one selected from CD36, CD162P, and CD63.

[0418] 325. The antibody composition according to any one of the above 1 to 8, wherein the first antigen is TIM-3 and the second antigen is one selected from CD123, CD33, CD47, CD70, and CLEC12A.

[0419] 326. The antibody composition according to any one of the above 1 to 8, wherein the first antigen is CD123 and the second antigen is one selected from CD33, CD47, CD70, and CLEC12A.

[0420] 327. The antibody composition according to any one of the above 1 to 8, wherein the first antigen is CD5 and the second antigen is CD23.

[0421] 328. The antibody composition according to any one of the above 1 to 8, wherein the first antigen is CD10 or CD5 and the second antigen is CD20.

[0422] 329. The antibody composition according to any one of the above 1 to 8, wherein the first antigen is CD40 and the second antigen is one selected from CD80, CD86, ICOS ligand, 4-1BB ligand, OX40 ligand, CD70, GITR, PD-L1, PD-L2, B7-DC, B7H3, B7H4, B7H5, B7H6, and B7H7.

[0423] 330. The antibody composition according to any one of the above 1 to 8, wherein the first antigen is PTPRS and the second antigen is one selected from IL-21R, CD38, and CD32a.

[0424] 331. The antibody composition according to any one of the above 1 to 8, wherein the first antigen is OX40 and the second antigen is CD127 or CD40 ligand.

[0425] 332. The antibody composition according to any one of the above 1 to 8, wherein the first antigen is OX40 and the second antigen is CD8 or NKG2D,

[0426] 333. The antibody composition according to any one of the above 1 to 8, wherein the first antigen is OX40 and the second antigen is CD 226.

[0427] 334. The antibody composition according to any one of the above 1 to 8, wherein the first antigen is OX40 and the second antigen is CRTH2.

[0428] 335. The antibody composition according to any one of the above 1 to 8, wherein the first antigen is CRTH2 and the second antigen is any one selected from CD2, CD7, and CD45.

[0429] 336. A pharmaceutical composition for use in a treatment of a cancer, containing the antibody composition according to any one of the above 314 to 320.

[0430] 337. A pharmaceutical composition for use in a treatment of leukemia, containing the antibody composition according to any one of the above 321 to 328.

[0431] 338. A pharmaceutical composition for use in a treatment of lymphoma, containing the antibody composition according to any one of the above 321 to 328.

[0432] 339. A pharmaceutical composition tor use in a treatment of an inflammatory disease, containing the antibody composition according to the above 329.

[0433] 340. A pharmaceutical composition for use in a treatment of an allergic disease, containing the antibody composition according to any one of the above 331, 334, and 335.

[0434] 341. A pharmaceutical composition for use in a treatment of at least one of vitiligo and psoriasis, containing the antibody composition according to the above 332.

[0435] 342. A pharmaceutical composition for use in a treatment of scleroderma, containing the antibody composition according to the above 333.

[0436] 343. Use of the antibody composition according to any one of the above 314 to 320 for producing a pharmaceutical composition for treating a cancer.

[0437] 344. Use of the antibody composition according to any one of the above 321 to 328 for producing a pharmaceutical composition for treating leukemia.

[0438] 345. Use of the antibody composition according to any one of the above 321 to 328 for producing a pharmaceutical composition for treating lymphoma.

[0439] 346. Use of the antibody composition according to the above 329 for producing a pharmaceutical composition for treating an inflammatory disease.

[0440] 347. Use of the antibody composition according to any one of the above 331, 334, and 335 for producing a pharmaceutical composition for treating an allergic disease.

[0441] 348. Use of the antibody composition according to the above 332 for producing a pharmaceutical composition for treating at least one of vitiligo and psoriasis.

[0442] 349. Use of the antibody composition according to the above 333 for producing a pharmaceutical composition for treating scleroderma.

[0443] 350. Use of the antibody composition according to any one of the above 314 to 320 for treating a cancer.

[0444] 351. Use of the antibody composition according to any one of the above 321 to 328 for treating leukemia.

[0445] 352. Use of the antibody composition according to any one of the above 321 to 328 for treating lymphoma.

[0446] 353. Use of the antibody composition according to the above 329 for treating an inflammatory disease.

[0447] 354. Use of the antibody composition according to any one of the above 331, 334, and 335 for treating an allergic disease.

[0448] 355. Use of the antibody composition according to the above 332 for treating at least one of vitiligo and psoriasis.

[0449] 356. Use of the antibody composition according to the above 333 for treating scleroderma.

[0450] 357. The antibody composition according to any one of the above 314 to 320 for use in a treatment of a cancer.

[0451] 358. The antibody composition according to any one of the above 321 to 328 for use in a treatment of leukemia.

[0452] 359. The antibody composition according to any one of the above 321 to 328 for use in a treatment of lymphoma.

[0453] 360. The antibody composition according to the above 329 for use in a treatment of an inflammatory disease.

[0454] 361. The antibody composition according to any one of the above 331, 334, and 335 for use in a treatment of an allergic disease.

[0455] 362. The antibody composition according to the above 332 for use in a treatment of at least one of vitiligo and psoriasis.

[0456] 363. The antibody composition according to the above 333 for use in a treatment of scleroderma.

[0457] 364. A method for treating a cancer, including administering an effective amount of the antibody composition according to any one of the above 314 to 320 to a subject.

[0458] 365. A method for treating leukemia, including administering an effective amount of the antibody composition according to any one of the above 321 to 328 to a subject.

[0459] 366. A method for treating lymphoma, including administering an effective amount of the antibody composition according to any one of the above 321 to 328 to a subject.

[0460] 367. A method for treating an inflammatory disease, including administering an effective amount of the antibody composition according to the above 329 to a subject.

[0461] 368. A method fin treating an allergic disease, including administering an effective amount of the antibody composition according to any one of the above 331, 334, and 335 to a subject.

[0462] 369. A method for treating at least one of vitiligo and psoriasis, including administering an effective amount of the antibody composition according to the above 332 to a subject.

[0463] 370. A method for treating scleroderma, including administering an effective amount of the antibody composition according to the above 333 to a subject.

[0464] 371. A pharmaceutical composition for use in a treatment of rheumatoid arthritis, containing the antibody composition according to the above 77.

[0465] 372. A pharmaceutical composition for use in a treatment of celiac disease, containing the antibody composition according to the above 78.

[0466] 373. A pharmaceutical composition for use in a treatment of an inflammatory bowel disease, containing the antibody composition according to the above 79.

[0467] 374. A pharmaceutical composition for use in a treatment of at least one of multiple sclerosis and an inflammatory bowel disease, containing the antibody composition according to the above 80.

[0468] 375. A pharmaceutical composition for use in a treatment of at least one of multiple sclerosis and an inflammatory bowel disease, containing the antibody composition according to the above 81.

[0469] 376. A pharmaceutical composition for use in a treatment of an allergic disease, containing the antibody composition according to the above 82.

[0470] 377. A pharmaceutical composition for use in a treatment of primary myelofibrosis, containing the antibody composition according to the above 83.

[0471] 378. A pharmaceutical composition for use in a treatment of at least one selected from an autoimmune disease, arteriosclerosis, and an ischemic heart disease, containing the antibody composition according to the above 84.

[0472] 379. A pharmaceutical composition for use in a treatment of systemic lupus erythematosus, containing the antibody composition according to the above 85.

[0473] 380. A pharmaceutical composition for use in a treatment of an allergic disease, containing the antibody composition according to the above 86.

[0474] 381. A pharmaceutical composition for use in a treatment of psoriasis, containing the antibody composition according to the above 87.

[0475] 382. A pharmaceutical composition fin use in a treatment of an allergic disease, containing the antibody composition according to the above 88.

[0476] 383. A pharmaceutical composition for use in a treatment of at least one selected from asthma, eosinophilic sinusitis, and atopic dermatitis, containing the antibody composition according to the above 89.

[0477] 384. A pharmaceutical composition for use in a treatment of at least one of asthma and eosinophilic sinusitis, containing the antibody composition according to the above 90.

[0478] 385. A. pharmaceutical composition for use in a treatment of an allergic disease, containing the antibody composition according to the above 91.

[0479] 386. A pharmaceutical composition for use in a treatment of langerhans cell histiocytosis (LCH), containing the antibody composition according to the above 92.

[0480] 387. A pharmaceutical composition for use in a treatment of systemic lupus erythematosus, containing the antibody composition according to the above 93.

[0481] 388. A pharmaceutical composition for use in a treatment of idiopathic pulmonary fibrosis, containing the antibody composition according to the above 94.

[0482] 389. A pharmaceutical composition for use in a treatment of a cancer, containing the antibody composition according to the above 95.

[0483] 390. A pharmaceutical composition far use in a treatment of systemic lupus erythematosus, containing the antibody composition according to the above 96 or 97.

[0484] 391. A pharmaceutical composition for use in a treatment of at least one selected from an autoimmune disease, arteriosclerosis, and an ischemic heart disease, containing the antibody composition according to the above 98.

[0485] 392. A pharmaceutical composition for use in a treatment of a fibrotic disease including at least one selected from idiopathic pulmonary fibrosis, systemic sclerosis, and hepatic, cirrhosis, containing the antibody composition according to the above 99.

[0486] 393. A pharmaceutical composition for use in a treatment of idiopathic pulmonary fibrosis, containing the antibody composition according to the above 100.

[0487] 394. A pharmaceutical composition for use in a treatment of at least one selected from neutrophilic asthma, chronic obstructive pulmonary disease, and Alzheimer's disease, containing the antibody composition according to the above 101.

[0488] 395. A pharmaceutical composition for use in a treatment of at least one selected from Crohn's disease, rheumatoid arthritis, and asthma, containing the antibody composition according to the above 102.

[0489] 396. A pharmaceutical composition for use in a treatment of at least one of multiple sclerosis and neuromyelitis optica, containing the antibody composition according to the above 103.

[0490] 397. A pharmaceutical composition for use in a treatment of systemic lupus erythematosus, containing the antibody imposition according to the above 104 or 105.

[0491] 398. A pharmaceutical composition for use in a treatment of multiple sclerosis, containing the antibody composition according to the above 106.

[0492] 399. A pharmaceutical composition for use in a treatment of hepatic cirrhosis, containing the antibody composition according to the above 107.

[0493] 400. A pharmaceutical composition for use in a treatment of systemic lupus erythematosus, containing the antibody composition according to the above 108.

[0494] 401. A pharmaceutical composition for use in a treatment of a mast cell activation syndrome (MCAS) including at least one selected from urticaria, a food allergy, and mastocytosis, containing the antibody composition according to the above 109.

[0495] 402. A pharmaceutical composition for use in a treatment of a mast cell activation syndrome (MCAS) including at least one selected from urticaria, a food allergy, and mastocytosis, containing the antibody composition according to the above 110.

[0496] 403. A pharmaceutical composition for use in a treatment of multiple sclerosis, containing the antibody composition according to the above 111.

[0497] 404. A pharmaceutical composition for use in a treatment of at least one selected from multiple sclerosis, type 1 diabetes mellitus, and rheumatoid arthritis, containing the antibody composition according to the above 112.

[0498] 405. A pharmaceutical composition or use in a treatment of at least one selected from secondary progressive multiple sclerosis (SPMS), rheumatoid arthritis for which anti-TNF therapy is no effective, transplantation, and systemic lupus erythematosus, containing the antibody composition according to the above 113.

[0499] 406. A pharmaceutical composition for use in a treatment of at least one selected from secondary progressive multiple sclerosis (SPMS), rheumatoid arthritis for which and TNF therapy is not effective, transplantation, and systemic lupus erythematosus, containing the antibody composition according to the above 114.

[0500] 407. A pharmaceutical composition for use in a treatment of asthma, containing the antibody composition according to the above 115.

[0501] 408. A pharmaceutical composition for use in a treatment of systemic scleroderma, containing the antibody composition according to the above 116.

[0502] 409. A pharmaceutical composition for use in a treatment of at least one of vitiligo and psoriasis, containing the antibody composition according to the above 117.

[0503] 410. A pharmaceutical composition for use in a treatment of at least one of vitiligo and psoriasis, containing the antibody composition according to the above 118.

[0504] 411. A pharmaceutical composition for use in a treatment of at least one of vitiligo and psoriasis, containing the antibody composition according to the above 119.

[0505] 412. A pharmaceutical composition for use in a treatment of at least one of vitiligo and psoriasis, containing the antibody composition according to the above 120.

[0506] 413. A pharmaceutical composition for use in a treatment of at least one of ANCA-associated vasculitis and systemic lupus erythematosus, containing the antibody composition according to the above 121.

[0507] 414. A pharmaceutical composition for use in a treatment of a T cell-dependent immune-related disease, containing the antibody composition according to the above 122.

[0508] 415. A pharmaceutical composition for use in a treatment of art immune-related disease, containing the antibody composition according to the above 123.

[0509] 416. A pharmaceutical composition for use hi a treatment of psoriatic arthritis, containing the antibody composition according to the above 124.

[0510] 417. A pharmaceutical composition for use in a treatment of an autoimmune disease including at least one of Sjogen's syndrome and psoriasis, containing the antibody composition according to the above 125.

### Advantageous Effects of Invention

[0511] The antibody composition of the present invention includes first and second IgG half-molecules that are two types of IgG half-molecules, which have antigen-binding domains for two types a antigens that are different from each other, and in which a CD16a-binding activity in CD16a-binding domains that are different from each other is attenuated. Accordingly, even if an antibody structure of a homo assembly is constituted the first IgG half-molecules or the second IgG half-molecules, it cannot bind to CD16a, and therefore cannot exhibit an activity of an antibody. On the other hand, when an antibody structure of a hetero assembly is constituted by the first and second IgG half-molecules, it can bind to CD16a through the second CD16a-binding domain in the first IgG half-molecule and the first CD16a -binding domain in the second IgG half-molecule.

[0512] Further, a hinge domain in the first and second IgG half-molecules is altered so as not to form a disulfide bond. Accordingly, an inter-H chain disulfide bond is not formed between the first IgG half-molecule and the second IgG half-molecule. Therefore, when the first and second IgG half-molecules are mixed, it becomes possible to make the first and second IgG half-molecules exist in an equilibrium state of an assembly or half-molecules. Accordingly, the antibody composition of the present invention can exhibit an effector function more specifically for a double-positive cell and damage the cell as compared with a single-positive cell.

[0513] In addition, in the antibody composition of the present invention, a specific amino acid alteration is introduced into a CD16a-binding domain or another Fc region in the first and second IgG half-molecules. Due to this, the hetero assembly formed by the first and second IgG half-molecules exhibits an enhanced effector function for a double-positive cell and/or controlled biokinetics,

### BRIEF DESCRIPTION OF DRAWINGS

[0514] FIG. 1 is a schematic diagram showing the structures of antibody, VHH-Fc, and scFv-Fc.

[0515] FIG. 2A shows a schematic diagram of the structure of a general bispecific antibody.

[0516] FIG. 2B shows a schematic diagram of a binding mode by a general bispecific antibody.

[0517] FIG. 3 shows a schematic diagram of an embodiment of a binding mode by an antibody composition of the present invention.

[0518] FIG. 4 shows a schematic diagram of an embodiment of the structure of the antibody composition of the present invention.

[0519] FIG. 5 shows a schematic diagram of a binding mode between normal human IgG1 and CD16a.

[0520] FIG. 6 shows a schematic diagram of a binding mode between the antibody composition of the present invention and CD16a.

[0521] FIG. 7 is a schematic diagram showing a candidate site of an amino acid alteration on a format of normal human IgG1.

[0522] FIG. 8 is a view showing the ADCC activity of human IgG1 anti-CCR6 antibodies in which a CD16a-binding domain was “disrupted”.

[0523] FIG. 9 is a schematic diagram of a monovalent antibody for evaluating an ADCC activity by asymmetrically introducing the alteration into only each of CH2-A and CH2-B.

[0524] FIG. 10 is a view showing the ADCC activity of CD16a-binding asymmetrically altered monovalent antibodies.

[0525] FIG. 11 is a schematic diagram of an IgG1114_AA_AAA_D265A (/P329Y)-type IgG half-molecule used in Example 3.

[0526] FIG. 12 shows the results of evaluating the purification degree by SDS-PAGE of anti-CD4 antibody half-molecules and anti-CD70 antibody half-molecules.

[0527] FIG. 13 shows the results of measuring the expression of CD4 antigen and CD70 antigen in CD4 single-positive cells, CD70 single-positive and CD4/CD70 double-positive cells.

[0528] FIG. 14 is a view showing the ADCC activity of anti-CD4 IgG1 and anti-CD70 IgG1 and half-molecules against CD4 single-positive cells, CD 70 single-positive cells, and CD4/CD70 double-positive cells.

[0529] FIG. 15A is a view showing the ADCC activity when adding each half-molecule against CD4/CD70 double-positive cells (TL-Om1), CD70 single-positive cells (MT-1), and CD4 single-positive cells (CD4. EL-4).

[0530] FIG. 15B is a view showing the ADCC activity when adding each half-molecule against CD4/CD70 double-positive can (TL-Om1), CD70 single-positive cells (MT-1), and CD4 single-positive cells (CD4/EL-4).

[0531] FIG. 15C is a view showing the ADCC activity when adding each half-molecule against CD4/CD70 double-positive cells (TL-Om1), CD70 single-positive cells (MT-1), CD4 single-positive cells (CD4/EL-4).

[0532] FIG. 15D is a view showing the ADCC activity when adding each half-molecule against CD4/CD70 double-positive cells (TL-Om1), CD70 single-positive cells (MT-1), and CD4 single-positive cells (CD4/EL-4).

[0533] FIG. 15E is a view showing the ADCC activity when adding each half-molecule against CD4/CD70 double-positive cells (TL-Om1), CD70 single-positive cells (MT-1), and CD4 single-positive cells (CD4/EL-4).

[0534] FIG. 15F is a view showing the ADCC activity when adding each half-molecule against CD4/CD70 double-positive cells (TL-Om1), CD70 single-positive cells (MT-1), and CD4 single-positive cells (CD4/EL-4).

[0535] FIG. 15G is a view showing the ADCC activity when adding each half-molecule against CD4/CD70 double-positive cells (TL-Om1), CD70 single-positive cells (MT-1), and CD4 single-positive cells (CD4/EL-4).

[0536] FIG. 15H is a view showing the ADCC activity when adding each half-molecule, anti -CD4 IgG1,or anti-CD70 IgG1 against CD4/C170 double-positive cells (TL-Om1) CD70 single-positive cells (MT-1), and CD4 single-positive cells (CD4/EL-4).

[0537] FIG. 16A is a view showing the ADCC activity when adding each half-molecule against CD4/CD70 double-positive cells (TL-Om1), CD70 single-positive cells (MT-1), and CD4 single-positive cells (CD4/EL-4). The name of the amino acid alteration introduced into the CH3 domain of the added half-molecule is shown above each graph.

[0538] FIG. 16B is a view showing the ADCC activity when adding each half-molecule, anti-CD4 IgG1, or anti-CD70 IgG1 against CD4/CD70 double-positive cells (TL-Om1), CD70 single-positive cells (MT-1), and CD4 single-positive cells (CD4/EL-4). The abbreviation of the added antibody (in the case or the half-molecule, the name of the amino acid alteration introduced into the CH3 domain) is shown above each graph.

[0539] FIG. 17 is a view showing the changes in serum antibody concentration when 1 mg/kg of an anti-DNP antibody (wild type) or each mixture of half-molecules was administered to mice.

[0540] FIG. 18A is a view showing the ADCC activity in an immunoglobulin-added system when adding each half-molecule against CD4/CD70 double-positive cells (TL-Om1), CD70 single-positive cells (MT-1), and CD4 single-positive cells (CD4/EL-4). As the abbreviation of the added half-molecule, the name of the CD16a-binding enhancing amino acid alteration is shown above each graph.

[0541] FIG. 18B is a view showing the ADCC activity in an immunoglobulin-added system when adding each half-molecule against CD4/CD*70 double-positive cells (TL-Om1) CD 70 single-positive cells (MT-1), and CD4 single-positive cells (CD4/EL-4). As the abbreviation of the added half-molecule, the name of the CD16a-binding enhancing amino acid alteration is shown above each graph.

[0542] FIG. 18C is a view showing the ADCC activity in an immunoglobulin-added system when adding a half-molecule, anti-CD4 IgG1, anti-CD70 IgG1 against CD4/CD70 double-positive cells (TL-Om1), CD70 single-positive cells (MT-1), and CD4 single-positive cells (CD4/EL-4). The abbreviation of the added antibody (in the case of the half-molecule, the name of the CD16a-binding enhancing amino acid alteration) is shown above each graph.

[0543] FIG 19A is a view showing the ADCC activity (cell viability) of each half-molecule in a human blood reconstitution system. The horizontal axis represents the concentration of the added antibody (in the case of the half-molecule, the total concentration of the mixture), and the vertical axis represents the existence ratio (%) of each target cell (shown above the graph) in the total CD3-positive T cells or the total lymphocytes when no antibody was added.

[0544] FIG. 19B is a view showing the ADCC activity (cell viability) of each half-molecule in a human blood reconstitution system. The horizontal axis represents the concentration of the antibody (in the case of the half-molecule, the total concentration of the mixture), and the vertical axis represents the existence ratio (%) of each target cell (shown above the graph) in the total CD3-positive T cells or the total lymphocytes when no antibody was added.

[0545] FIG. 20 is a view showing the ADCC activity when adding each half-molecule, anti-CCR4 IgG1, anti-CCR4 IgG1 against CD4/CCR4 double-positive cells (TL-Om1), CCR4 single-positive cells (MT-1), and CD4 single-positive cells (CD4/EL-4).

[0546] FIG. 21 is a view showing the ADCC activity when adding each half-molecule, anti-CD4 IgG1, or anti-CCR4 IgG1 against CD4/CCR4 double-positive cells (HH), CCR4 single-positive cells (L428), and CD4 single-positive cells (TALL1).

[0547] FIG. 22 is a view showing the ADCC activity when adding each half-molecule, anti-CCR4 IgG1, anti-CD70 IgG1 against CCR4/CD70 double-positive cells (LA28), CCR,4 single-positive cells (PEER), and CD70 single-positive cells (SUP-M2).

[0548] FIG. 23 is a view showing the binding activity to CD16a of each half-molecule and an anti-DNA antibody.

### DESCRIPTION OF EMBODIMENTS

[0549] 1. Structure of Antibody Composition

[0550] In the present invention, an antibody molecule, is also referred to as an immunoglobulin (hereinafter referred to as Ig), and a human antibody is classified into isotypes of IgA1, IgA2, IgD, IgE, IgG1, IgG2, IgG3, IgG4, and IgM according to a difference in molecular structure. IgG1, IgG2, IgG3, and IgG4 haying relatively high homology of an amino acid sequence are also collectively referred to as IgG.

[0551] An antibody molecule is constituted by polypeptides called heavy chain (hereinafter referred to as H chain) and light chain (hereinafter referred to L chain). An antibody tetrameric protein composed of two H chains and two L chains.

[0552] Further, the H chain is constituted by each region of an H chain variable region also referred to VH) and an H chain constant region (also referred CH) from the N terminal side and the L chain is constituted by each region of an L chain variable region (also referred to as VL) and an L chain constant region (also referred to as CL) from the N terminal side. In the CH, α, δ, ε, γ and μ chains are known for each subclass. In the CL, λ and κ are known.

[0553] A domain is a functional structural unit that constitutes each polypeptide of an antibody molecule. Further, an Fc region (Fc) in the present invention refers to a partial sequence and a partial structure of an H chain constant region composed of a hinge domain, a CH2 domain, and a CH3 domain.

[0554] The CH is constituted by each domain of a CH1 domain, a hinge domain, a CH2 domain, and a CH3 domain from the N terminal side. The CH1 domain, the hinge domain, the CH2 domain, the CH3 domain, and the Fc in the present invention can be specified by the amino acid residue number from the N terminus according to the EU index [Kabat et al., Sequences of Proteins of immunological interest, US Dept. Health and Human Services (1991)].

[0555] Specifically, CH1 is specified as an amino acid sequence at positions 118 to 215 according to the EU index, the hinge is specified as an amino acid sequence at positions 216 to 230 according to the EU index, CH2 is specified as an amino acid sequence at positions 231 to 340 according to the EU index, and CH3 is specified as an amino acid sequence at positions 341 to 447 according to the EU index.

[0556] As the IgG in the present invention, an artificial subspecies of an altered molecule that includes at least an antigen-binding domain and Fc and has a similar function to IgG is also included. Specifically, an altered molecule obtained by substitution, deletion or addition, or modification of an amino acid residue of IgG, and further an adduct of a polypeptide or a domain, and the like are included. Further, those obtained by substitution of a part or the whole of an antigen-binding site composed of VH, VL, or Fab of IgG with another antigen-binding domain are also included. Specifically, single-chain (scFv)-Fc, a variable domain of heavy chain of heavy chain antibody (VHH)-Fc shown in FIG. 1, and the like are also included (Brinkmann U et al., MABS 2017, 9: 182-212; Fernandes C F C et al., Frontiers in Immunology 2017, 8: 653).

[0557] As the antibody in the present invention, other than a monoclonal antibody obtained from a hybridoma, a recombinant antibody produced by a genetic recombination technique is also included. As the recombinant antibody, a chimeric, antibody obtained by binding a human antibody constant region to a non-human antibody variable region, a humanized antibody, and a human antibody produced using a human antibody-producing animal, or the like are included.

[0558] The chimeric antibody can be produced by obtaining cDNAs encoding VH and VL from a hybridoma that produces a monoclonal antibody and is derived from a non-human animal cell, inserting each of the cDNAs into an expression vector the an animal cell having DNAs encoding CH and CL of a human antibody, thereby constructing a human chimeric antibody expression vector, and introducing the vector into an animal cell and expressing the antibody.

[0559] The humanized antibody refers to an antibody produced by inserting complementarity determining regions (hereinafter abbreviated as CDRs) of the H chain and the L chain of a non-human antibody variable region into a framework region (hereinafter abbreviated as FR) of a human antibody variable region.

[0560] The humanized antibody (or a CDR-grafted antibody) can be produced by the following method. A cDNA encoding the amino acid sequence of a CDR of VH of a non-human animal antibody and the amino acid sequence of VH composed of the amino acid sequence of FR of VH of an arbitrary human antibody, and a cDNA encoding the amino acid sequence of a CDR of VL of a non-human animal antibody and the amino acid sequence of VL composed of the amino acid sequence of FR of VL of an arbitrary human antibody are constructed. Each of the cDNAs is inserted into an expression vector for an animal cell having DNAs encoding CH and CL of a human antibody to construct a humanized antibody expression vector, and introducing the vector into an animal cell and expressing the antibody, whereby the humanized antibody can be produced.

[0561] The human antibody originally refers to an antibody that can be naturally present in the human body or an antibody composed of an amino acid sequence encoded by a human gene, but also includes antibodies that are obtained from human antibody phage libraries, cloning of immortalized human peripheral blood lymphocytes, or human antibody-producing transgenic animals, which are produced by recent advancement of genetic engineering, cellular engineering, and developmental engineering technologies, and the like.

[0562] The human antibody can be obtained by immunizing a mouse having a human immunoglobulin gene (Tomizuka et al., Proc Natl Acad Sci USA, 97, 722-7, 2000) with a desired antigen. Further, the human antibody can be obtained without immunization by selecting a human antibody having a desired binding activity using a phage display library obtained by amplifying antibody genes from human-derived B cells (Winter G. et al., Annu Rev Immunol. 12: 433-55, 1994).

[0563] Further, the human antibody can be obtained by producing a cell that produces a human antibody having a desired binding activity by immortalizing a human B cell using EB virus (Rosen A. et al., Nature 267, 52-54, 1977).

[0564] As for the antibody that is present in the human body, for example, a lymphocyte isolated from human peripheral blood is infected with EB virus or the like so as to immortalize it, followed by cloning, whereby a lymphocyte that produces the antibody can be cultured, and the antibody can be purified from the culture.

[0565] The human antibody phage library is a library of phages in which an antibody fragment such as Fab or scFv is expressed on the surface thereof by inserting an antibody gene prepared from a human B cell into a phage gene. It is possible to collect phages that express an antibody fragment having a desired antigen-binding activity from the library using a binding activity to a substrate onto which an antigen is immobilized as an index. The antibody fragment further can also be converted into a human antibody molecule composed of two complete H chains and two complete chains using a genetic engineering technique.

[0566] The human antibody-producing transgenic animal refers to an animal in which a human antibody gene is incorporated into the chromosome of a host animal. Specifically, the human antibody-producing transgenic animal can be produced by introducing a human antibody gene into a mouse ES cell, implanting the ES cell to an early embryo of another mouse, and then allowing the embryo to develop.

[0567] As for a method for producing a human antibody from a human antibody-producing transgenic animal, a human antibody-producing hybridoma is obtained by a general method for producing a hybridoma performed for mammals other than humans, and cultured, whereby human antibody can be produced and accumulated in the culture.

[0568] The amino acid sequences of VH and VL may be any of the amino acid sequences of VH and VL a human antibody, the amino acid sequences of VH and VL of a non-human animal antibody, the amino acid sequences of a humanized antibody in which a CDR of a non-human animal antibody is implanted to a framework of a human antibody, and the amino acid sequences of VH and VL derived from a human antibody.

[0569] Specifically, the ammo acid sequences of VH and VL of a non-human animal antibody, a humanized antibody, and a human antibody that a hybridoma or an antibody-producing cell produces, and the like are exemplified.

[0570] The amino acid sequence of CL may be either the amino acid sequence of a human antibody or the amino acid sequence of a non-human animal antibody, but is preferably the amino acid sequence of Cκ or Cλ of a human antibody.

[0571] The CH may be any as long as it belongs to an immunoglobulin, but preferably, any of γ1 (IgG1), γ2 (IgG2), γ3 (IgG3), and γ4 (IgG4) subclasses belonging to the human IgG class can be used.

[0572] The “antigen-binding domain” may be a binding protein recombined by utilizing a binding domain of a known binding molecule such as an antibody, a ligand, a receptor, or the like, and specific examples include a recombinant protein including a CDR of an antibody that binds to each antigen, an antibody variable region including a CDR, a recombinant protein including an antibody variable region and a binding domain of a ligand that binds to each antigen, and the like. Among these, the antigen-binding domain is preferably an antibody variable region in the present invention.

[0573] The antibody composition of the present invention is an antibody composition against a first antigen and a second antigen that are different from each other, including a first IgG half-molecule and a second half-molecule, and has the following properties 1) to 6).

[0574] 1) Each of the first IgG half-molecule and the second IgG half-molecule is composed of one L chain and one H chain, and the H chain includes an H chain variable region, a hinge domain, and CH1, CH2, and CH3 domains, and has first and second CD16a-binding domains that are different from each other in the CH2 domain.

[0575] 2) The hinge domain of each of the first IgG half-molecule and the second IgG half-molecule includes an alteration of a substitution or a deletion of a part or the whole or a modification so as not to form an inter-H chain disulfide bond between the first IgG half-molecule and the second IgG half-molecule.

[0576] 3) The first IgG half-molecule includes an antigen-binding domain that binds to the first antigen, and includes an alteration for attenuating a CD16a-binding activity in the first CD16a-binding domain.

[0577] 4) The second IgG half-molecule includes an antigen-binding domain that binds to the second antigen, and includes an alteration for attenuating a CD16a-binding activity in the second CD16a-binding domain.

[0578] 5) Each of the first IgG half-molecule and the second IgG half-molecule includes an alteration for enhancing a CD16a-binding activity.

[0579] 6) At least one of the first IgG half-molecule and the second IgG half-molecule includes an alteration for attenuating an inter-CH3 domain interaction as compared with an inter-CH3 domain interaction of the IgG1 subclass.

[0580] The “antibody composition against a first antigen and a second antigen that are different from each other” denotes a composition containing an IgG half-molecule against a first antigen and an IgG half-molecule against a second antigen.

[0581] As a possible state of the IgG half-molecule in the antibody composition of the present invention, for example, a monomeric half-molecule and an assembly composed of half-molecules are exemplified. Examples of the half-molecule include the first IgG half-molecule and the second IgG half-molecule. Examples of the assembly include an assembly of the first IgG half-molecules, an assembly of the second IgG half-molecules, and an assembly of the first IgG half-molecule and the second IgG half-molecule. Specifically, the first and second half-molecules contained in the antibody composition may be in a state of equilibrium between an assembly composed of the first IgG half-molecules and an assembly composed of the second IgG half-molecules, and an assembly composed of the first IgG half-molecule and the second IgG half-molecule.

[0582] The “antibody composition against a first antigen and a second antigen that are different from each other” of the present invention also includes an antibody composition containing an IgG half-molecule against first antigenic determinant (epitope) and an IgG half-molecule against a second antigenic determinant (epitope) in the same antigen.

[0583] The “IgG half-molecule” is a dimeric protein composed of one L chain and one H chain, and the H chain includes an H chain variable region, CH1 to CH3 domains, and a hinge domain. In the CH2 domain of the H chain of the IgG half-molecule, two CD16a-binding domains (first and second CD 16a-binding domains) that are different from each other are present.

[0584] Further, the “IgG half-molecule” also includes a half-molecule of an artificial subspecies of altered molecule that includes an antigen-binding domain and Fc and has a similar function to IgG. Specifically, a half-molecule of an altered molecule obtained by substitution, deletion or addition, or modification of an amino acid of IgG, and further a half-molecule of an adduct of a polypeptide or a domain, and the like are included. Further, half-molecules of those obtained by substitution of a part or the whole of an antigen-binding site composed of VH, VL, or Fab of IgG with another antigen-binding domain, speeilically, half-molecules of single-chain Fv (scFv)-Fc and VHH-Fc shown in FIG. 1, and the like are also included.

[0585] The “CD16a-hinding domain” refers to a domain that is present in Fc of IgG and binds to CD16a. The CD16a-binding domain on Fc of IgG1 is present at two sites due to the point symmetry of the structure of Fc, and in the CH2 domain constituting Fc and composed of two polypeptide chains, contact with CD16a is made in regions that are different from each other (see FIG. 5).

[0586] Examples of the first CD16a-binding domain include a domain including at least one selected from amino acid residues at position 235, position 236, position 237, position 238, position 239, position 265, position 266, position 267, position 268, position 269, position 294, position 295, position 296, position 297, position 298, position 299, position 301, position 325, position 327, and position 332 numbered according to the EU index.

[0587] When the immunoglobulin subclass of the CH2 domain is IgG1, examples of the first CD16a-binding domain include a domain including at least one selected from amino acid residues of Leu at position 235, Gly at position 236, Gly at position 237, Pro at position 238, Ser at position 219, Asp at position 265, Val at position 266, Ser at position 267, His at position 268, Glu at position 269, Glu at position 294, Gln at position 295, Tyr at position 296, Asn at position 297, Ser at position 298, Thr at position 299, Arg at position 301, Asn at position 325, Ala at position 327, and Ile at position 332 numbered according to the EU index.

[0588] Examples of the second CD16a-binding domain include a domain including at least one selected from amino acid residues at position 235, position 226, position 237, position 326, position 327, position 328, position 329, and position 330 numbered according to the EU index.

[0589] When the immunoglobulin subclass of the CH2 domain is IgG1, examples of the second CD16a-binding domain include a domain including at least one selected from amino acid residues of Leu at position 235, Gly position 236, Gly at position 237, Lys at position 324, Ala at position 327, Leu at position 328, Pro at position 329, and Ala at position 330 numbered according to the EU index.

[0590] The “CD16a-binding activity” refers to an activity of binding of Fc of IgG CD16a. The CD16a-binding activity of the IgG half-molecule can be confirmed by combining two IgG half-molecules to form IgG, and thereafter allowing the IgG to react with a recombinant CD16a protein, and measuring the binding activity (US Patent Application Publication No. 2004/0259150).

[0591] As one aspect of the method for measuring the CD16a-binding activity of the IgG half-molecule, for example, the binding activity to CD16a expressed on a cell membrane can be measured by a fluorescent antibody method (Cancer Immunol. Immunother, 36, 373, 1993), or the like. Further, for example, the binding activity to a purified CD16a protein can be measured according to an immunological quantitative method such as Western staining, RIA (radioimmunoassay), VIA (viroimmunoassay), EIA (enzymoimmunoassay), FIA (fluoroimmunoassay), or MIA (metalloimmunoassay) described in literature [Monoclonal Antibodies: Principles and Applications, Wiley-Liss, Inc., 1995; Enzyme Immunoassay, 3rd ed., IGAKU-SHION Ltd. (1987); Enzyme Antibody Techinque, Revised Edition, Gakusai Kikaku (1985)], or the like.

[0592] Specifically, for example, when the binding activity to the purified CD16a protein is quantified by EIA, the quantification can be carried out as follows. FcγRIIIa is immobilized on a plastic plate for EIA, and is allowed to react with a sample containing the antibody composition. Subsequently, the amount of the antibody composition bound using an appropriate secondary antibody is measured.

[0593] The binding activity to the purified CD16a protein can also be measured by measurement using a biosensor [for example, BIAcore (manufactured by Biacore, Inc.)] [J. Immunol. Methods, 200, 121 (1997)] or by an isothermal titration calorimetry method [Proc. Natl. Acad. Sci. U.S.A., 97, 9026 (2000)], or the like.

[0594] Further, the CD16a-binding activity of the IgG half-molecule can also be confirmed by allowing the ce of the IgG half-molecule to have the below-mentioned effector function (ADCC activity or the like), constituting IgG in which two molecules of the IgG half-molecule are combined, and measuring the effector function of the IgG.

[0595] The “effector function” refers to an antibody-dependent function caused via Fc of an antibody. As the effector function, for example, an ADCC activity; a CDC activity, or antibody-dependent phagocytosis (antibody-dependent cellular phagocytosis activity: ADCP activity) by a phagocyte such as a macrophage or a dendritic cell is exemplified. As a method for measuring the effector function, for example, an ADCC activity and a CDC activity can be measured using a method described in Cancer Immunother, 36, 373 (1993).

[0596] As one aspect of the method for measuring an ADCC activity or a CDC activity, for example, the following method is exemplified. Specifically, for example, a method described later in Examples is exemplified.

[0597] 1) As an effector cell, a human peripheral blood mononuclear cell (PBMC) or a cell line made to stably express human CD16a by gene transfer of human CD16a, and a target cell are prepared using a culture medium (for example, RPlMI medium). In the case of measurement of a CDC activity a solution obtained by diluting a human complement protein to an appropriate concentration is mixed with a target cell and adjusted.

[0598] 2) Into a cell culture container (for example, 96-well plate), an antibody solution, the target cells, and the effector cells are dispensed. The number ratio of the effector cells and the target cells (E/T ratio) is made constant.

[0599] 3) The resultant is left to stand for about 2 to 6 hours in a incubator. At the same time, a solubilizing solution (for example, an aqueous solution containing an acid, an alkali, a surfactant, or the like) is added to a 100% reaction well, and the target cells are completely lysed. After the reaction container is centrifuged, the supernatant is collected and dispensed into an ELISA plate. A coloring solution is applied thereto to cause a reaction, and thereafter, a stopping solution is added thereto, and an absorbance (A450) is measured using a plate reader.

[0600] 4) The ADCC activity (%) and the CDC activity (%) are calculated using the following formula.

ADCC activity(%)or CDC activity(%)=100×(S−E−T)(Max−T)

[0601] S=absorbance of sample reaction well—absorbance of culture medium well

[0602] E=absorbance of effector well—absorbance of culture medium well

[0603] T=absorbance of target well—absorbance of culture medium well

[0604] Max100% reaction well—100% reaction control well

[0605] As a kit for ADCC measurement, a known kit can be used, and for example, CytoTox 96(R) Non-Radioactive Cytotoxicity Assay (Promega) is exemplified.

[0606] The ADCC activity refers to an activity in which an antibody bound to an antigen on a target cell binds to an Fc receptor of an immune cell via Fc of the antibody so as to activate the immune cell (a natural killer cell or the like) and damage the target cell.

[0607] The Fc receptor (hereinafter sometimes referred to as FcR) is a receptor that binds to Fc of an antibody, and the binding of the antibody induces various effector functions.

[0608] The FcR corresponds to the subclass of an antibody, and IgG, IgE, IgA, and IgM bind specifically to FcγR, FcεR, and FcαR, respectively. Further, in the FcγR, there exist FcγRI (CD64), FcγRII (CD32), and FcγRIII (CD16) subtypes, and there exist FcγRIA, FcγRIB, FcγRIC, FcγRIIA, FcγRIIB, FcγRIIC, FcγRIIIA (CD16a), and FcγRIIIB isoforms, respectively. The different types of FcγRs are present on different cells [Anna. Rev. Immunol. 9: 457-492 (1991)].

[0609] In humans, FcγRIIIB is expressed specifically in neutrophils, and FcγRIIIA is expressed in monocytes, natural killer cells (NK cells), and some T cells. Binding of the antibody via FcγRIIIA induces NK cell-dependent ADCC.

[0610] The CDC activity refers to an activity in which an antibody bound to an antigen on a target cell activates a series of cascades (complement activation pathways) composed of complement-related protein groups in the blood, and damages the target cell. In addition, a protein fragment generated by the activation of the complement can induce the migration and activation of an immune cell.

[0611] The cascade of CDC activity starts by forming a C1 complex through binding of C1q having a binding domain for Fc of an antibody to Fc, and its binding to C1r and C1s that are two serine proteases.

[0612] The state where “the CD16a-binding activity in the CD16a-binding domain is attenuated” refers to a state where the CD16a-binding activity and/or the effector function (ADCC activity or the like) of IgG obtained by combining two molecules of the IgG half-molecule to which an alteration for attenuating the CD16a-binding activity in the first and/or second CD16a-binding domain in Fc is added is attenuated as compared with the CD16a-binding activity and/or the effector function of IgG obtained by combining two molecules a the IgG half-molecule before the alteration.

[0613] As one aspect of the state where the CD16a-binding activity in the CD16a-binding domain is attenuated, for example, a state where the CD16a-binding activity of IgG obtained by combining two molecules of the IgG half-molecule to which the alteration is added is preferably 60% or less, more preferably 50% or less, further more preferably, in the following order, 40% or less, 30% or less, 20% or less, and 10% or leas when the CD 16a-binding activity of IgG obtained by combining two molecules of the IgG half-molecule before the alteration is taken as 100% is exemplified.

[0614] As one aspect of the state where the CD16a-binding activity in the CD 16a-binding domain is attenuated, for example, a state where the ADCC activity of IgG obtained by combining, two molecules of the IgG half-molecule to which the alteration is added is preferably 80% or less, more preferably 70% or less, further more preferably, in the following order, 60% or less, 50% or less, 40% or less, and 30% or less when the ADCC activity of IgG obtained by combining two molecules of the IgG half-molecule before the alteration is taken as 100% is exemplified.

[0615] The CD16a-binding activity in the CD16a-binding domain is attenuated by alteration in the CD16a-binding domain. The “alteration” in the present description refers to alteration of an amino acid residue from the wild-type amino acid sequence, and means, for example, substitution, deletion, or addition, or modification of an amino acid residue. In the present description substitution of an amino acid residue is also abbreviated as amino acid residue substitution. The alteration for attenuating the CD16a-binding activity in the CD16a-binding domain in the present description is not particularly limited by the type of antigen to which the antibody of the present invention binds, and an antibody having any antigen-binding domain may be combined with any alteration as long as the effect of the present invention is exhibited.

[0616] Examples of the alteration for attenuating the CD16a-binding activity in the first CD16a-binding domain include substitution of at least one amino acid residue selected from amino acid residues at position 235, position 236, position 237, position 238, position 239, position 265, position 266, position 267, position 268, position 269, position 294, position 295, position 296, position 297, position 298, position 299, position 301, position 325, position 327, and position 332 numbered according to the EU index, and preferred is substitution of at least one amino acid residue selected from amino acid residues at position 235, position 238, position 239, position 265, position 266, position 267, position 268, position 269, position 294, position 295, position 296, position 297, position 298, position 299, position 301, position 325, position 327, and position 332, and more preferred is substitution of at least one amino acid residue selected from amino acid residues at position 235, position 238, position 239, position 265, position 267, position 269, position 296, position 298, position 299, and position 327. As a combination of amino acid residue substitutions, for example, amino acid residue substitutions at position 238 and position 265 in combination (hereinafter such a combination is represented by position 238/position 265, or the like), at position 238/position 267, at position 265/position 267, or at position 238/position 265/position 267 is exemplified.

[0617] When the immunoglobulin subclass of the CH2 domain is IgG1, examples of the alteration for attenuating the CD16a-binding activity in the first CD16a-binding domain include substitution of at least one amino acid residue selected from Leu at position 235, Gly at position 236, Gly at position 237, Pro at position 238, Ser at position 239, Asp at position 265, Val at position 266, Ser at position 267, His at position 268, Glu at position 269, Glu at position 294, Gln at position 295, Tyr at position 296, Asn at position 297, Ser at position 298, Thr at position 299, Arg at position 301, Asn at position 325, Ala at position 327, and Ile at position 332 numbered according to the EU index, and preferred is substitution of at least one amino acid residue selected from Leu at position 235, Pro at position 238, Ser at position 239, Asp at position 265, Val at position 266, Ser at position 267, His at position 268, Glu at position 269, Gln at position 294, Gln at position 295, Tyr at position 296, Asn at position 297, Ser at position 298, Thr at position 299, Arg at position 301, Asn at position 325, Ala at position 327, and Ile at position and preferred is substitution of at least one amino acid residue selected from Leu at position 235, Pro at position 238, Ser at position 239, Asp at position 265, Ser at position 267, Gln at position 269, Tyr at position 296, Ser at position 298, Thr at position 299, and Ala at position 327. Specifically, for example, at least one amino acid residue substitution selected from L235R, P238A, S239R, D265A, D265N, D265E, S267L, S267K, E269P, Y296P, S298E, T299A, and A327I is exemplified.

[0618] Examples of the alteration for attenuating the CD16a-binding activity in the second CD16a-binding domain include substitution of at least one amino acid residue selected from amino acid residues at position 235, position 236, position 237, position 326, position 327, position 328, position 329, and position 330 numbered according to the EU index, and preferred is substitution of at least one amino acid residue selected from amino acid residues at position 326, position 328, position 329, and position 330, and more preferred is substitution of at least one amino acid residue selected from amino acid residues at position 326, position 328, and position 329. As a combination of amino acid residue substitutions, for example, amino acid residue substitutions at position 326/position 328, at position 326/position 329, at position 328/position 329, and at position 126/position 328(position 129 are exemplified.

[0619] When the immunoglobulin subclass of the CH2 domain is examples of the alteration for attenuating the CD16a-binding activity in the second CD16a-binding domain include substitution of at least one amino acid residue selected from Leu at position 235, Gly at position 236, Gly at position 237, Lys at position 326, Ala at position 327, Leu at position 328, Pro at position 329, and Ala at position 330 numbered according to the EU index, and preferred is substitution of in least on amino acid residue selected from Lys at position 326, Leu at position 328, Pro at position 329, and Ala at position 130, and more preferred is substitution of at least one amino acid residue selected from Lys at position 326, Leu at position 328, and Pro at position 329. Specifically, at least one amino acid residue substitution selected from K326W, K326G, L328V, L328R, P329Y, P329K, P329W, and A330P is exemplified.

[0620] A combination of the alteration for attenuating the CD16a-binding activity to CD16a-binding domain of the first half-molecule and the alteration for attenuating the CD16a-binding activity in the CD16a-binding domain of the second IgG half-molecule is not particularly limited as long as asymmetric alterations are brought about, and the above-mentioned alterations can be appropriately combined. Specific examples include the following combinations of amino acid residue substitutions.
[0621] amino acid residue substitutions at position 265 in the first IgG half-molecule and at position 329 in the second IgG half-molecule
[0622] amino acid residue substitutions at position 329 in the first IgG half-molecule and at position 265 in the second IgG half-molecule
[0623] amino acid residue substitutions at position 238/position 267 in the first IgG half-molecule and at position 329 the second IgG half-molecule
[0624] amino acid residue substitutions at position 329 in the first IgG half-molecule and at position 238/Position 267 in the second IgG half-molecule

[0625] The combination of the alteration to attenuating the CD16a- binding activity in the CD16a -binding domain of the first IgG half-molecule (first alteration) and the alteration for attenuating the CD16a-binding activity in the CD16a-binding domain of the second IgG half-molecule (second alteration) is preferably combinations shown in the following Table 1, and more preferably a combination of the first alternation and the second alteration as follows: S267K and P329Y, Y296P and P329 Y, S298E and P329Y, D265A and P329Y, or S239R and P329Y.

TABLE 1

| First | Second | First | Second |
|---|---|---|---|
| alteration | alteration | alteration | alteration |
| D265A | P329Y | Y296P | P329K |
| P238A/S267L | P329Y | S298E | P329K |
| S239R | K326G | T299A | P329K |
| S239R | L328R | S239R | P329W |
| D265A | L328R | D265A | P329W |
| D265E | L328R | D265N | P329W |
| S267K | L328R | D265E | P329W |
| E269P | L328R | S267K | P329W |
| Y296P | L328R | E269P | P329W |
| S298E | L328R | Y296P | P329W |
| T299A | L328R | S298E | P329W |
| S239R | P329Y | T299A | P329W |
| D265E | P329Y | L235R | P329W |
| S267K | P329Y | A327I | P329W |
| Y296P | P329Y | S239R | A330P |
| S298E | P329Y | D265A | A330P |
| T299A | P329Y | D265E | A330P |
| L235R | P329Y | S267K | A330P |
| A327I | P329Y | E269P | A330P |
| S239R | P329K | Y296P | A330P |
| D265A | P329K | S298E | A330P |
| D265E | P329K | T299A | A330P |
| S267K | P329K | L235R | A330P |
| | | A327I | A330P |

[0626] An amino acid residue after substitution described above may be a mutually substitutable amino acid. Hereinafter, examples of the mutually substitutable amino acid are shown. Amino acids included in the same group can be mutually substituted.

[0627] group A: leucine, isoleneine, norleucine, valine, norvaline, alanine, 2-aminobutanoic acid, methionine, O-methylserine, t-butyl glycine, t-buyl alanine, and cyclohexylalanine

[0628] group B: aspartic acid, glutamic acid, isoaspartic acid, isoglutamic acid, 2-aminoadipic acid, and 2-aminosuberic acid

[0629] group C: asparagine and glutamine

[0630] group D: lysine, arginine, ornithine, 2,4-diaminobutanoic acid, and 2,3-diaminopropionic acid

[0631] group E: proline, 3-hydroxyproline, and 4-hydroxyproline

[0632] group F: serine, threonine and homoserine

[0633] group G: phenylalarnine and tyrosine

[0634] The above-mentioned amino acids to be substituted may be either a natural type or an unnatural type. Examples of the natural amino acid include L-alanine, asparagine, L-aspartic acid, L-glutamine, L-glutamic acid, glycine, L-histidine, L-isoleucine, L-leucine, L-lysine, L-arginine, L-methionine, L-phenylalanine, L-proline, L-serine, L-threonine, L-tryptophan, L-tyrosine, L-valine, L-cysteine, and the like. Examples of the unnatural amino acid include various amino acids having an amino group and as carboxyl group, however, preferably, derivatives of various types of natural amino acids are desired. Many unnatural amino acids are available from respective reagent companies (Sigma-Aldrich Co. LLC, TCI Co., Ltd., and the like). With respect to the unnatural amino acids, there are many disclosures in literature (Chem. Today 2003, 65; Curr Opin Chem Biol. 2000, 6, 645).

[0635] In the first IgG half-molecule, the CD16a-binding activity in the first CD16a-binding domain is attenuated by alteration, and also in the second IgG half-molecule, the CD16a-binding activity in the second CD16a-binding domain is attenuated by alteration. Accordingly, even if an antibody structure of a homo assembly is constituted by the first IgG half-molecules or the second IgG half-molecules, it cannot bind to CD16a, and therefore cannot exhibit the activity of an antibody.

[0636] On the other hand, when an antibody structure of a hetero assembly is constituted by the first and second IgG half-molecules, it can bind to CD16a through the second CD16a-binding domain in the first IgG half-molecule and the first CD16a-binding domain in the second IgG half-molecule (see FIG. 5).

[0637] The first and second IgG half-molecules have antigen-binding domains that are different front each other. Therefore, by constituting an antibody structure of a hetero assembly composed of the first and second IgG half-molecules, the assembly becomes an antibody composition which CD16a binds to and thus can specifically exhibit an effector function such as an ADCC activity only when it binds to a target cell expressing two types of antigens that are different from each other on the same cell.

[0638] A hinge domain in each of the first and second IgG half-molecules is altered so as not to form a disulfide bond by substitution or deletion of a part or the whole thereof or modification. Accordingly, inter-H chain disulfide bond is not formed between the first IgG half-molecule and the second IgG half-molecule.

[0639] Therefore, by the coexistence of the first and second IgG half-molecules, it becomes possible to make the first and second IgG half-molecules exist in an equilibrium state of an assembly or half-molecules, so that high specificity for a double-positive cell can be exhibited.

[0640] Accordingly, the antibody composition of the present invention can exhibit an effector function specifically for a target cell coexpressing a first antigen and a second antigen and damage the cell as compared with an effector function for a target cell expressing only the first antigen and a target cell expressing only the second antigen.

[0641] In the present invention, the phrase “exhibit an effector function specifically for a target cell coexpressing a first antigen and a second antigen as compared with an effector function for a target cell expressing only the first antigen and a target cell expressing only the second antigen” means that the effector function for a target cell coexpressing a first antigen and a second antigen (double-positive cell) is strong as compared with the effector function for a target cell expressing only the first antigen and a target cell expressing only the second antigen (single-positive cell).

[0642] Whether an effector function specific for a double-positive cell is exhibited as compared with a singles-positive cell can be evaluated by a method described in the sections [1] High Specificity for Double-Positive Cell and [2] Enhanced Effector Function.

[0643] As the substitution of a part of a hinge domain so as not to them an inter-H chain disulfide bond between the fast IgG half-molecule and the second IgG half-molecule, for example, amino acid residue substitutions at position 226 and position 229 numbered according to the EU index are exemplified. Alternatively, deletion of a part or the whole of a hinge domain containing the cysteine site is exemplified. As the substitution of a part of a binge domain so as not to form an inter-H chain disulfide bond between the first IgG half-molecule and the second IgG half-molecule, specifically for example, amino acid residue substitutions of C226A and C229A numbered according to the EU index are preferred.

[0644] In order to make the first and second IgG half-molecules exist in the above-mentioned equilibrium state, it is effective that the non-covalent bonding interaction between the H chains in the first and second IgG half-molecules is attenuated, and in particular, it is preferred that the inter-CH3 domain interaction is attenuated.

[0645] Specifically, for example, it is preferred that the inter-CH3 domain interaction of the H chains in first and second IgG half-molecules is weaker than the inter-CH3 domain interaction of the IgG1 subclass.

[0646] As a method for attenuating the inter-CH3 domain interaction as compared with the inter-CH3 domain interaction of the IgG1 subclass, it is preferred to introduce an amino acid alteration (an amino acid residue substitution, deletion, or addition, or modification or the like) in the CH3 domain, and it is particularly preferred to introduce an amino acid residue substitution. Examples of the CH3 domain into which an amino acid alteration is introduced to attenuate the inter-CH3 domain interaction as compared with the inter-CH3 domain interaction of the IgG1 subclass include a CH3 domain of IgG1 and a CH3 domain of IgG4.

[0647] It has been reported that the interaction between CH3 domains is enhanced by substituting Arg at position 409 numbered according to the EU index in the CH3 domain of human IgG4 with Lys derived from human (Structure 2011 19: 9; 1274-1282). Further, there has also been a report that an amino acid site important for the interaction between the CH3 domains of human IgG1 was identified based on changes in free energy by substituting a specific amino acid residue in the CH3 domain of human IgG1 with Ala (Biochemistry 1998: 37: 9266-9273).

[0648] The amino acid residue substitution for attenuating the inter-CH3 domain interaction may be any as long as it attenuates the inter-CH3 domain interaction based on the amino acid sequence of the CH3 domain to he used, and it may be introduced into at least one of the first IgG half-molecule and the second IgG half-molecule, but is preferably introduced into each of them. The amino acid residue substitution for attenuating the inter-CH3 domain interaction can be identified by evaluating a molecule including a desired amino acid residue substitution using a binding assay such as binding ELISA or an SPR method, a molecular weight analysis such as SDS-PAGE or native mass spectrometry, or the like.

[0649] As the ammo acid residue substitution for attenuating the inter-CH3 domain interaction specifically, substitution of at least one amino acid residue at position selected from position 349, position 351, position 366, position 368, position 399, position 405, position 407, and position 409 numbered according to the EU index in CH3 domain with another amino acid residue is exemplified.

[0650] More specifically, Y349A, L351A, T366 A, L368A, D399A, F405A, Y1407A, K409A, and K409R are preferred, L368A, Y407A, and K409R are more preferred, and K409R is most preferred. Among these amino acid residue substitutions, any one substitution may be introduced, or two or more substitutions may be introduced in combination.

[0651] 2. Control of Effector Function of Antibody Composition

[0652] The antibody composition of the present invention can also be imparted with an effector function dependent on Fc in the first and second IgG half-molecules. The effector function of the antibody composition can be controlled by various methods.

[0653] For example, it is preferred to further enhance the CD16a-binding activity by further including at least one amino acid residue substitution fur enhancing the CD16a-binding activity in the CH2 domain in the first and second IgG half-molecules. Accordingly, the effector function of the antibody composition can be enhanced.

[0654] The amino acid residue substitution for enhancing the CD16a-binding activity may be introduced into each of the first and second IgG half-molecules or may be introduced into only either one of them. When the amino acid residue substitution for enhancing the CD16a-binding activity is introduced into both the first and second IgG half-molecules, the amino acid residue substitution in the first IgG half-molecule and the amino acid residue substitution in the second IgG half-molecule may be the same or different, but are preferably the same.

[0655] When the amino acid residue substitution for enhancing the CD16a -binding activity of the antibody composition is introduced into both the first and second IgG half-molecules, the amino acid residue substitutions at in regions different from the regions altered for attenuating the CD16a-binding activity in the first and second IgG half-molecules.

[0656] Examples of a method for controlling the effector function of the antibody composition of the present invention include a method as described below.

[0657] For example, the effector function of the antibody composition can be controlled by a method for controlling the amount of fucose (also referred to as core fucose) that is α1,6-linked to N-acetylglucosamine (GlcNAc) present at the reducing end side of an N-linked complex sugar chain (hereinafter sometimes simply abbreviated as complex sugar chain) that is bound to Asn at position 297 according to the EU index using the amino acid sequence of Fe of the IgG1 subclass in the first and second IgG half-molecules (WO 2005/035586, WO 2002/31140, or WO 00/61739), or b substituting an amino acid residue of Fc of the antibody.

[0658] 1) Control of Effector Function by Sugar Chain Alteration

[0659] The effector function of the antibody composition can be enhanced or decreased by controlling the content of fucose to he added to N-acetylglucosamine at the reducing end of the complex sugar chain bound to Fc of the first and second IgG half-molecules.

[0660] As for a method for decreasing the content of fucose to be added to the N-linked complex sugar chain bound to Fc of the IgG half-molecule the IgG half-molecule in which fucose is not bound can be obtained by expressing the IgG half-molecule using an α1,6-fucosyltransferase (FUT8) gene-deficient CHO cell. The antibody composition composed of the IgG half-molecule in which fucose is not bound has a high ADCC activity.

[0661] On the other hand, as for a method for increasing the content fucose to be added to the N-linked complex sugar chain bound to Fc of the IgG half-molecule, the IgG half-molecule in which fucose is bound can be obtained by expressing the IgG half-molecule using a host cell into which an α1,6-fucosyltransferase gene has been introduced. The antibody composition composed of the IgG half-molecule in which fucose is bound has a lower ADCC activity than the antibody composition composed of the IgG half-molecule in which fucose is not bound.

[0662] In Fc of the IgG half-molecule, the N-linked sugar chain is bound to the Asn residue at position 297 according to the EU index, however, it is not known that the sugar chain is bound to other Asn residues of Fc. Therefore, generally, two N-glycoside-linked sugar chains are bound per molecule of the antibody.

[0663] As the N-linked sugar chain, a high mannose type, a complex type, and a hybrid type are known, and a higher ADCC activity as compared with a sugar chain to which fucose is bound can be obtained by any N-linked sugar chain as long as it is a sugar chain to which fucose is not bound.

[0664] As the complex sugar chain to be bound to Fc of the IgG half-molecule, a sugar chain in which one or more N-acetylglucosamine (GlcNAc) residues or galactose-N-acetylglucosamine (hereinafter referred to as Gal-GlcNAc) residues are α1,2-linked or α1,4-linked to mannose (Man) at the non-reducing end side of a core structure (trimannosyl core structure) is exemplified.

[0665] Further, a complex type sugar chain having sialic acid, bisecting N-acetylglucosamine (hereinafter referred to as bisecting GlcNAc), or the like at the non-reducing end side of Gal-GlcNAc can be exemplified.

[0666] In the present invention, the core fucose or the α1,6-fucose refers to a sugar chain structure in which the 6-position of N-acetylglucosamine (hereinafter sometimes referred to as GlcNAc) at the reducing end of the N-glycoside-linked complex sugar chain and the 1-position of fucose (hereinafter sometimes referred to as Fuc) are α-linked. Further, the sugar chain in which fucose is not bound to N-acetylglucosamine at the reducing end of the N-glycoside-linked complex sugar chain is simply referred to as a sugar chain having no fucose or no core fucose.

[0667] Further, in the present invention, the core structure or the trimatmosyl core structure refers to a Manα1-6(Manα1-3)Manβ1-4GlcNAcβ1-4GlcNAc structure.

[0668] As the sugar chain bound to the IgG half-molecule, a double-stranded N-glycoside-linked complex sugar chain (also referred to as a biantennary complex sugar chain) is represented by the following chemical formula.

[chemical structure]

[0669] The first and second IgG half-molecules preferably have Fc in which the complex sugar chain is bound to Asn at position 297 according to the EU index. They may have a single sugar chain structure or a plurality of different sugar chain structures as long as they have the above-mentioned sugar chain structure. Specifically, an antibody composition in which the ratio of the sugar chain in which fucose is not bound to N-acetylglucosamine at the reducing end or the sugar chain (sugar chain having no core fucose) among all the N-glycoside-linked sugar chains bound to Fc in the first and second IgG half-molecules is 20% or more is exemplified.

[0670] The ratio of the sugar chain having no core fucose includes any ratio as long as the ADCC activity of antibody composition is increased, but a ratio of preferably 20% or more, more preferably 51% to 100%, further more preferably 80% to 100%, particularly preferably 90%, 91%, 92% 93%, 94%, 95%, 96%, 97%, 98%, or 99%, and most preferably, 100% can be exemplified.

[0671] The ratio of the sugar chain having no core fucose being 50% includes, for example, both an antibody composition containing a molecule in which fucose is not bound to one sugar chain of the N-glycoside-linked sugar chains bound to the first and second IgG half-molecules at 100%, and an antibody composition containing a molecule in which fucose is not bound to both sugar chains of the N-glycoside-linked sugar chains bound to the first and second IgG half-molecules at 50% and also containing a molecule in which fucose is bound to both sugar chains of the N-glycoside-linked sugar chains bound to the first and second IgG half-molecules at 50%.

[0672] In the present invention, as the sugar chain having no fucose, the structure of the sugar chain at the non-reducing end side may be any as long as fucose is not bound to N-acetylglucosamine at the reducing end side in the chemical formula shown above.

[0673] In the present invention, the state where fucose is not bound to N-acetylglucosamine at the reducing end of the sugar chain (having no core fucose) refers to a state where fucose is not substantially bound thereto. The IgG half-molecule in which fucose is not substantially bound specifically refers to a case where it is an IgG half-molecule to such an extent that fucose cannot be substantially detected in the below-mentioned sugar chain analysis. The extent that fucose cannot be substantially detected refers to that it is the detection limit or less in the measurement. The antibody composition including the first and second IgG half-molecules having no core fucose in all the sugar chains has the highest ADCC activity.

[0674] The ratio of the IgG half-molecule including a sugar chain having no fucose in the IgG half-molecule having Fc to which the N-glycoside-linked complex sugar chain is bound can be determined by releasing the sugar chains using a known method such as hydrazinolysis or enzyme digestion [Biochemical Experimentation Methods 23-Method for Studying Glycoprotein Sugar Chain (Japan Scientific Societies Press) edited by Reiko Takahashi (1989)] from the IgG half-molecule, subjecting the released sugar chains to fluorescence labeling or radioisotope labeling, and separating the labeled sugar chains by chromatography.

[0675] In addition, the ratio of the IgG half-molecule in which a sugar chain having no fucose is bound included in the IgG half-molecule containing Fc in which the complex sugar chain is bound can be determined by analyzing the released sugar chains using an HPAED-PAD method (J. Chromatogr., 6, 1577, 1983).

[0676] 2) Control of Effector Function by Amino Acid Residue Substitution

[0677] The antibody composition of the present invention can enhance or attenuate an effector function such as an ADCC activity, an ADCP activity and a CDC activity by changing the antibody subclass of Fc or by amino acid residue substitution in Fc in the first IgG half-molecule and the second IgG half-molecule.

[0678] The IgG1 subclass antibody is known to have the highest ADCC activity and CDC activity in the IgG subclasses, and the immunoglobulin subclass of the CH2 domain is preferably IgG1.

[0679] As the amino acid residue substitution in Fc, for example, by using the amino acid to sequence of Fc described in US Patent Application Publication No. 2007/0148165, the CDC activity of the antibody can be increased. Further, by performing an amino acid residue substitution described in U.S. Pat. No. 6,737,056, 7,297,775 and 7,317,091, the ADCC activity or the CDC activity of the antibody composition can be enhanced or attenuated.

[0680] Specific examples of the amino acid residue substitution for enhancing the ADCC activity include P247I, A339D, F243L, R292P, Y300L, P396L, T393A, H433P, S239D, S298A, A330L, I1332E, E333A, K334A, and the like. On the other hand, specific examples of the amino acid residue substitution for decreasing the ADCC activity include L235E, P238A, N297A, K322A, P331S, and the like.

[0681] The ADCC activity can be enhanced by combining any two or more of the above-mentioned amino acid residue substitutions, and the number of amino acid residues to be substituted can be increased according to the purpose. As a combination of amino acid residue substitutions capable of enhancing the ADCC activity, S298A/E333A/K334A/P247L, S298A/E333A/K334A/H268E, S298A/E333A/K334A/P247L/N421K, S298A/E333A/K334A/E294W, S298A/E333A/K334A/K326T, S298A/E333A/R292L/K334E, S298A/E333A/K334A/S239D, S298A/E333A/K334A/K248M, S239D/I332E, S239D/A330P, S239D/K326T, S239D/K326E, S239D/K326I, S219D/I332D, S239E/I332Y, S239E/I332E, S239E/K326T, and S239E/K326I are preferred.

[0682] The amino acid residue substitution for enhancing ADCC activity may affect the pharmacokinetics of the antibody, and therefore, it is preferred that the antibody in which the amino acid residue substitution is introduced has pharmacokinetics comparable to that of the wild-type IgG antibody in which the amino acid residue substitution is not introduced. As the specific amino acid substitution, S239D, S239E, S239D/K326T, S239D/A330F, S239D/K326E, S239E/I332E, S298A/E333A/K334A, S298A/E333A/K334A/H268E, and S239D/S298A/E333A/L242C/K334C are preferred, and S239D/K326T and S239D/S298A/E333A/L242C/K334C are more preferred. The comparable pharmacokinetics means 50% or more and 150% or less as compared with the wild-type IgG antibody in any index of maximum blood concentration (Cmax), blood half-life (t1/2), or area under the blood concentration-time curve (AUC).

[0683] As a specific amino acid residue substitution for increasing the CDC activity, at least one amino acid residue substitution selected from K326A, S267E, H268F, S324T, K274Q, N276K, Y296F, Y300F, K326W, K226Y, E333A, E333S, A339T, D356E, L358M, N384S, K392N, T394F, T394Y, V397M, and V422I is exemplified.

[0684] The CDC activity can also be increased by combining any two or more of the above-mentioned amino acid residue substitutions, and the number of amino acid residues to be substituted can be increased according to the purpose. As the amino acid residue substitution tor increasing the CDC activity, preferably at least one amino acid residue substitution selected from N276K, A339T, T394F, and T394Y, amino acid residue substitutions of N276K and A339T, amino acid residue substitutions of K274Q, N 276K, Y296F, Y300F, A339T, D356E, L358M, N384S, V397M, and V422I, and the like are exemplified. On the other hand, as a specific amino acid residue substitution for decreasing the CDC activity, L235E, N297A, K322A, P329 A, P331S, and the like are exemplified.

[0685] In addition, the blood half-life can be extended by introducing an amino acid residue substitution such as T250Q, M428L, M252Y, S254T, or T256E into Fc of the human IgG1 subclass. Moreover, cellular cytotoxicity such as an ADCC activity, an ADCP activity, or a CDC activity can be attenuated or deleted using Fc from which an N-linked sugar chain has been removed, Fc of human IgG2 or IgG4 subclass, chimeric Fc of IgG2 and IgG4, or the like by introducing an amino acid residue substitution at position N297.

[0686] 3. Method for Producing Antibody Composition

[0687] As the method for producing an antibody composition of the present invention, a production method including, the following steps 1 to 3 is exemplified.

[0688] Step 1: a step of introducing a recombinant vector containing a DNA encoding the amino acid sequence of the IgG half-molecule (hereinafter also abbreviated as a recombinant vector for expression of the IgG half-molecule) into a cell, thereby obtaining a transformant

[0689] Step 2: a step of culturing the transformant obtained in the step to accumulate the IgG half-molecule in a culture, and collecting the IgG half-molecule from the culture

[0690] Step 3: a step of obtaining an antibody composition composed of the IgG half-molecule collected in the step 2

[0691] Hereinafter, the respective steps will be described.

[0692] [Step 1]

[0693] The step 1 is a step of introducing a recombinant vector containing a DNA encoding the amino acid sequence of at least one of the first and second IgG half-molecules into a cell, thereby obtaining a transformant.

[0694] The step (1) specifically includes the following steps (1-1) to (1-3).

[0695] (1-1) a step of introducing an alteration for attenuating a CD16a-binding activity in the first CD16a-binding domain in the first IgG half-molecule

[0696] (1-2) a step of introducing an alteration for attenuating a CD16a-binding activity in the second CD16a-binding domain in the second IgG half-molecule

[0697] (1-3) a step of introducing an alteration for performing substitution or deletion of a part or the whole or modification of a hinge domain so as not to form an inter-H chain disulfide bond in the hinge domains of the first and second IgG half-molecules.

[0698] As for the step (1-1), for example, in the production of a recombinant vector for expression of the first IgG half-molecule, performing a step of substituting at least one amino acid residue selected from amino acid residues at position 235, position 236, position 237, position 238, position 239, position 265, position 266, position 267, position 268, position 269 position 294, position 295, position 296, position 297, position 298, position 299, position 301, position 325 position 327, and position 332 numbered according to the EU index as appropriate according to the subclass of the CH2 domain is exemplified.

[0699] As for the step (1-2), for example, in the production of a recombinant vector for expression of the second IgG half-molecule, performing a step of substituting at least one amino acid residue selected from amino acid residues at position 235, position 236, position 237, position 326, position 327, position 328, position 329, and position 330 numbered according to the EU index as appropriate according to tire subclass of the CH2 domain is exemplified.

[0700] As for the step (1-3), for example, in the production of a recombinant vector for expression of the IgG half-molecule, performing a step of adding substitutions of amino acid residues at position 226 and position 229 numbered according to the EU index as appropriate according to the subclass of the hinge domain is exemplified.

[0701] The IgG half-molecule can be obtained, for example, by expressing it in a transformant in the following manner using a method described in Molecular Cloning, Second Edition, Current Protocols in Molecular Biology, Antibodies, A Laboratory Manual, Cold Spring Harbor Laboratory, 1988, Monoclonal Antibodies: principles and practice, Third Edition, Acad. Press, 1993, Antibody Engineering, A Practical Approach, IRL Press at Oxford University Press, 1996, or the like.

[0702] (1) Construction of Recombinant Vector for Expression of IgG Half-Molecule

[0703] The recombinant vector for expression of the IgG half-molecule is an expression vector for animal cells into which a gene encoding the amino acid sequence of the IgG half-molecule constituting the antibody composition of the present invention is incorporated.

[0704] The recombinant vector can be constructed by cloning a DNA encoding the amino acid sequence of the IgG half-molecule into an expression vector for animal cells.

[0705] As for the DNA, the total DNA may be synthesized or synthesis by a polymerase chain reaction (PCR method) is also possible (Molecular Cloning, Second Edition). Further, it is also possible to produce the gene encoding the IgG half-molecule by combining a plurality of such methods.

[0706] When an animal cell is used as a host, as the expression vector, any vector can be used as long as it can exhibit its function in the animal cell. Examples thereof include pcDNAI, pCDM8 (manufactured by Funakoshi Co., Ltd.), pAGE107 [JP-A-H3-22979; and Cytotechnology, 3, 133 (1990)], pAS3-3 (JP-A-H2-227075), pCDM8 [Nature, 329, 840 (1987)], pcDNAI/Amp (manufactured by Invitrogen, Inc.), pcDNA3.1 (manufactured by Invitrogen, Inc.), pREP4 (manufactured by Invitrogen, Inc.), pcGE103 [J Biochemistry, 101, 1307 (1987)], pAGE210, pME18SFL3, pKANTEX93 (WO 97/10354), N5KG1 val (U.S. Pat. No. 6,001,358), a Tol2 transposon vector (WO 2010/143698), and the like.

[0707] As a promoter, any promoter can be used as long as it can exhibit its functions in an animal cell. Examples thereof include a cytomegalovirus (CMV) immediate early (IE) gene promoter, an SV40 early promoter, a retrovirus promoter, a metallothionein promoter, a heat-shock promoter, an SRα promoter, and a Moloney murine leukemia virus promoter or enhancer. In addition, a human CMV IE gene enhancer may be used together with the promoter.

[0708] As the expression vector, either of a type in which the H chain and the L chain of the antibody exist on separate vectors or a type in which both the H chain and the L chain of the antibody exist on the same vector (hereinafter referred to as tandem type) can be used.

[0709] (2) Acquisition of cDNA Encoding Variable Region

[0710] cDNAs encoding VH and VL of an arbitrary antibody can be obtained in the following manner. The cDNAs are synthesized using mRNA extracted from a hybridoma cell that produces the arbitrary antibody as a template. The synthesized cDNAs are inserted into a vector such as a phage or a plasmid, thereby producing a cDNA library.

[0711] A recombinant phage or a recombinant plasmid having a cDNA encoding VH and a recombinant phage or a recombinant plasmid having a cDNA encoding an L chain variable region are each isolated from the library using a DNA encoding a constant region or a variable region of an existing antibody as a probe. The entire base sequences of VH and VL of the target antibody on the recombinant phage or the recombinant plasmid are determined, and then, the entire amino acid sequences of VH or VL are deduced from the base sequences.

[0712] The hybridoma cell that produces an arbitrary non-human animal antibody can be obtained as follows. A non-human animal is immunized with an antigen to which the antibody binds, and a hybridoma is produced from an antibody-producing cell of the immunized animal and as myeloma cell according to a well-known method [Molecular Cloning, Second Edition, Current Protocols in Molecular Biology, Antibodies, A Laboratory Manual, Cold Spring Harbor Laboratory, 1988, Monoclonal Antibodies: principles and practice Third Edition, Acad. Press, 1993, Antibody Engineering, A Practical Approach, IRL Press at Oxford University Press, 1996]. Subsequently, a single-cell cloned hybridoma is selected and cultured, followed by purification from the culture supernatant.

[0713] As the non-human animal, any animal such as a mouse, a rat, a hamster, or a rabbit can be used as long as it can produce a hybridoma cell.

[0714] Examples of the method for preparing total RNA from the hybridoma cell include a guanidine thiocyanate-cesium trifluoroacetate method [Methods in Enzymol. 154, 3 (1987)], and an RNeasy Kit (Manufactured by QIAGEN, Inc.), and also examples of the method for preparing mRNA from total RNA include an oligo (dT) immobilized cellulose column method [Molecular Cloning: A Laboratory Manual, Cold Spring Harbor Lab. Press New York, 1989] and the like.

[0715] Further, examples of a kit for preparing mRNA from the hybridoma cell include Fast Track mRNA isolation Kit (manufactured by Invitrogen, Inc.), Quick Prep mRNA Purification Kit (manufactured by Pharmacia Company), and the like.

[0716] Examples of the methods for synthesizing a cDNA and preparing a cDNA library include conventional methods (Molecular Cloning: A Laboratory Manual, Cold Spring Harbor Lab, Press New York, 1989 and Current Protocols in Molecular Biology, Supplement 1-34), and a method using a commercially available kit. Examples of the commercially available kit include Super Script (registered trademark) Plasmid System for cDNA Synthesis and Plasmid Cloning (manufactured by GIBCO BBL, Inc.) and ZAP-cDNA Synthesis Kit (manufactured by Stratagene, Inc.).

[0717] When the cDNA library is produced, as the vector into which a cDNA synthesized using mRNA extracted from a hybridoma cell as a template is incorporated, any vector can be used as long as it can incorporate the cDNA.

[0718] For example, ZAP Express (Strategies, 5, 58, 1992) pBluescript II SK(+) (Nucleic Acids Research 17, 9494, 1989), λZAP II (manufactured by Stratagene, Inc.) λgt 10 and λgt 11 (DNA Cloning: A Practical Approach, I, 49, 1985), Lambda BlueMid (manufactured by Clontech Laboratories, Inc.), λExCell, pT7T3 18U (manufactured by Pharmacia, Inc.), pcD2 (Mol. Cell. Biol., 3, 280, 1983), pUC18 (Gene, 33, 103, 1985) or the like can be used.

[0719] As Escherichia coli into which a cDNA library constructed by a phage or plasmid vector is introduced, any Escherichia coli can be used as long as it can introduce, express, and maintain the cDNA library.

[0720] For example, XL1-Blue MRF (Strategies, 5, 81, 1992), C600 (Genetics, 39, 440, 1954), Y1088, Y1090 (Science, 222, 778, 1983), NM522 Journal of Molecular Biology (J. Mol. Biol., .166, 1, 1983), K802 (J. Mol, Biol., 16, 118, 1966), JM105 (Gene, 38. 275, 1985), or the like is used.

[0721] As for the method for selecting cDNA clones encoding VH and VL of the non-human antibody from the cDNA library, the selection can be carried out by a colony hybridization method or a plaque hybridization method using a probe labeled with an isotope, fluoresce, oil the like (Molecular Cloning: A Laboratory Manual, Cold Spring Harbor Lab. Press New York, 1989).

[0722] Further, it is also possible to prepare cDNAs encoding VH and VL by preparing primers and performing PCR (Molecular Cloning: A Laboratory Manual, Cold Spring Harbor Lab. Press New York 1989; and Current Protocols in Molecular Biology, Supplement 1-34) using the cDNAs or the cDNA library as a template.

[0723] The cDNA selected by the above-mentioned method is cleaved with an appropriate restriction enzyme or the like, and then cloned into a plasmid such as pBluescript II SK(−) (manufactured by Stratagene, Inc.), and the base sequence of the cDNA can be determined by a commonly used base sequence analysis method, for example, by performing a reaction of a dideoxy method by Sanger et al. (Proc. Natl. Acad. Sci. U.S.A, 74, 5463, 1977) or tile like, and then performing an analysis using an automatic base sequence analyzer, for example, a base sequence analyzer such as an ABI PRISM 377 DNA sequencer (manufactured by Applied Biosystems, Inc.).

[0724] By deducing the entire amino acid sequence of each of VH and VL from the determined base sequence and comparing it with the entire amino acid sequence of each of VH and VL of a known antibody (Sequences of Proteins of Immunological Interest, US Dept. Health and Human Services, 1991), it can be confirmed whether the obtained cDNA encodes the amino acid sequence completely including each of VH and VL of the antibody containing a secretion signal sequence.

[0725] Further, when the amino acid sequence of an antibody variable region or the base sequence of a DNA encoding the variable region is already known, it can be produced using the following method.

[0726] When the amino acid sequence is known, the DNA can be obtained by designing the base sequence of a DNA encoding the variable region in consideration of the codon usage frequency (Sequences of Proteins of Immunological interest, US Dept. Health and Human Services, 1991), synthesizing several synthetic DNAs composed of approximately 100 to 150 bases based on the base sequence of the designed DNA, and carrying out the PCR method using them or synthesizing a full-length DNA. When the base sequence is known, the DNA can be obtained in the same manner as described above based on the information.

[0727] (3) Analysis of Amino Acid Sequence of Variable Region of Antibody

[0728] With respect to the complete amino acid sequences of VH and VL of the antibody containing a secretion signal sequence, by comparing them with the amino acid sequences of VH and VL of a known antibody (Sequences of Proteins of Immunological Interest, US Dept. Health and Human Services, 1991), the length of the secretion signal sequence and the N-terminal amino acid sequence can be deduced, and further the subgroup to which the antibody belongs can be known. In addition, also the amino acid sequences of the respective CDRs of VH and VL can be found out by a similar method.

[0729] (4) Construction of cDNA Encoding Variable Region of Humanized Antibody

[0730] The cDNAs encoding VH and VL of a humanized antibody can be constructed in the following manner. First, the amino acid sequences of framework regions (hereinafter referred to as FRs) of VH and VL of a human antibody for grafting CDRs of VH and VL of a target non-human animal antibody are selected. As the amino acid sequences of FRs of VH and VL of the human antibody, any can be used as long as they are derived from a human antibody.

[0731] Examples thereof include amino, acid sequences of FRs of VH and VL of human antibodies registered in a database such as Protein Data Bank, common amino acid sequences in each subgroup of FRs of VH and VL of human antibodies (Sequences Proteins of Immunological Interest, US Dept. Health and Human Services, 1991), and the like.

[0732] Among them, in order to produce the humanized antibody having a sufficient activity, it is preferred to select amino acid sequences having a homology as high as possible (at least 60% or more) with the amino acid sequences of FRs of VH and VL of the target non-human animal antibody.

[0733] Subsequently, the amino acid sequences of CDRs of VH and VL of the target non-human animal antibody are grafted to the selected amino acid sequences of FRs of VH and VL of the human antibody, and the amino acid sequences of VH and VL of the humanized antibody are designed. The designed amino acid sequences are converted into base sequences of DNAs in consideration of the usage frequency of codons found in the base sequences of the antibody genes (Sequences of Proteins of Immunological Interest, US Dept. Health and Human Services, 1991), and the base sequences of DNAs encoding the ammo acid sequences of VH and VL of the humanized antibody are designed. The designed base sequences of the DNAs are fully synthesized.

[0734] Further, cloning into the recombinant vector for expression of the IgG half-molecule constructed in the above 3(1) can be easily carried out by introducing an appropriate restriction enzyme recognition sequence at the 5′ ends of the synthetic DNA located at both ends. After PCR, each of the amplification products is cloned into a plasmid such as pBluescript II SK(−) manufactured by Stratagene, Inc.) and the base sequences are determined by the method described in the above 3(2), thereby obtaining a plasmid having the base sequences of the DNAs encoding the amino acid sequences of VH and VL of the desired humanized antibody.

[0735] (5) Alteration of Amino Acid Sequence of Variable Region of Humanized Antibody

[0736] It is known that the antigen-binding activity of a humanized antibody prepared merely by grafting only CDRs of VH and VL of a non-human animal antibody to FRs of VH and VL of a human antibody is decreased as compared with that of the original non-human animal antibody (BIO/TECHNOLOGY, 9, 266 1991).

[0737] The reason for this is probably because in VH and VL of the original non-human animal antibody not only CDRs but also some of the amino acid residues of FRs are directly or indirectly involved in the antigen-binding activity, and such amino acid residues are changed to different amino acid residues of FRs of VH and VL of the human antibody by grafting the CDRs.

[0738] In order to solve this problem, an attempt has been made for a humanized antibody to raise the lowered antigen-binding activity by identifying the amino acid residues directly involved in the binding to an antigen or the amino acid residues indirectly involved in the binding to an antigen through an interaction with the amino acid residues of CDRs to maintain the conformation of the antibody in the amino acid sequences of FRs of VH and VL of the human antibody, and altering them to amino acid residues derived from the original non-human animal antibody (BIO/TECHNOLOGY, 9, 266, 1991).

[0739] In the production of the humanized antibody, it is most important how efficiently the amino acid residues of FRs involved in the antigen-binding activity are identified, and therefore, the construction and analysis of the conformation of the antibody have been carried out by X-ray crystallography (J. Mol. Biol., 112, 535, 1977), computer modeling (Protein Engineering, 7, 1501, 1994), or the like.

[0740] Such information of the conformation of the antibody has provided much useful information for the production of humanized antibodies. However, there has not yet been established any method for producing a humanized antibody adaptable to all types of antibodies. At present, it is still necessary to make various trial-and-error approaches such as production of several types of variants for each antibody and examination of the correlation with the antigen-binding activity among the variants.

[0741] Alteration of the amino acid residues of FRs of VH and VL of a human antibody can be achieved by performing the PCR method described in the above 3(4) using synthetic DNAs for alteration. With respect to the amplification product after the PCR, the base sequence is determined by the method described in 3(2) to confirm that the desired alteration has been carried out.

[0742] (6) Expression of IgG Half-Molecule

[0743] A transformant that transiently or stably produces at least one of the first and second half-molecules can be obtained by introducing the recombinant vector for expression of the IgG half-molecule of the above 3(1) into an appropriate animal cell.

[0744] (6-a) Transient Expression of Antibody Composition

[0745] By performing transient expression of antibody compositions using the recombinant vector for expression of the IgG half-molecule obtained in (3) and (6) or a recombinant vector obtained by alteration thereof the antigen-binding activity of many types of antibody compositions produced can be efficiently evaluated.

[0746] As a host cell into which the recombinant vector for expression of the IgG half-molecule is introduced, any cell can be used as long as it is a host cell capable of expressing at least one of the first and second IgG half-molecules. For example, COS-7 cells [American Type Culture Collection (ATCC) number: CRL1651] are exemplified (Methods in Nucleic Acids Res, CRC press, 283, 1991).

[0747] In the introduction of the recombinant vector for expression of the IgG half-molecule into COS-7 cells, a DEAE-dextran method (Methods in Nucleic Acids Res., CRC press, 1991), a lipofection method (Proc. Natl. Acad, Sci. USA, 84, 7413, 1987), or the like is used.

[0748] After the introduction of the recombinant vector for expression of the IgG half-molecule, the expression level and the antigen-binding activity of the IgG half-molecule in a culture supernatant are measured using an enzyme immunoassay method [Monoclonal Antibodies-Principles and practice, Third edition, Academic Press (1996), Antibodies—A Laboratory Manual, Cold Spring Harbor Laboratory (1988) and A manual for monoclonal antibody experiments, Kodansha scientific books (1987)] or the like.

[0749] (6-b) Stable Expression of IgG Half-Molecule

[0750] A transformant that stably expresses the IgG half-molecule can be obtained by introducing the recombinant vector for expression of the IgG half-molecule obtained in (1) into an appropriate host cell.

[0751] In the introduction of the recombinant vector into a host cell, any method can be used as long as it is a method for introducing a DNA into the host cell, and examples thereof include an electroporation method (Cytotechnology, 3, 133, 1990), a calcium phosphate method (JP-A-H2-227075), a lipofection method (Proc. Natl. Acad. Sci. U.S.A., 84, 7413, 1987), an injection method [Manipulating the Mouse Embryo A Laboratory Manual], a method using a particle gun (gene gun) (Japanese Patent No. 2606856 and Japanese Patent No. 2517813), a DEAE-dextran method [Biomanual Series 4-Methods of Gene Transfer, Expression and Analysis (Yodosha), edited by Takashi Yokota and Kenichi Arai (1994)], a virus vector method (Manipulating Mouse Embryo, Second Edition), and the like.

[0752] As the host cell into which the recombinant vector is introduced, any cell can be used as long as it is a host cell capable of expressing at least one the first and second IgG half-molecules. Examples thereof include human leukemia cell Namalwa cells, monkey COS cells, CHO cells that are Chinese hamster cells, HBT5637 (JP-A-S63-299), rat myeloma cells, mouse myeloma cells, cells derived from Syrian hamster kidney, embryonic stem cells, fertilized egg cells, and the like.

[0753] Specific examples thereof include PER.C6, CHO-K1 (AFCC CCL-61), DUKXB11 (ATCC CCL-9096), Pro-5 (ATCC CCL-1781), CHO-S (Life Technologies, Cat #11619), Lec13 cells, rat myelorna cells YB2/3HL.P2.G11.16Ag20 (ATCC NO: CRL1662, or also called YB2/0), mouse myeloma cells NS0, mouse myeloma cells SP2/0-Ag14 (ATCC NO: CRL1581), mouse P3X63-Ag8,653 cells (ATCC NO: CRL1580), dihydrofolate reductase gene (dihydroforate reductase, hereinafter referred to as dhfr)-deficient CHO cells (CHO/DG44) [Proc. Natl. Acad. Sci. USA, 77, 4216 (1980)], Syrian Hamster cells BHK, HBT563 cells, of substrains of the above-mentioned cell lines and cells prepared by acclimating the above-mentioned cell tines under serum-free culture, cells prepared by acclimating the above-mentioned cell lines under non-adhesion culture conditions, and the like.

[0754] As a cell used for the production of the IgG half-molecule, a cell for decreasing or deleting the amount of core fucose of the sugar chain bound to Asn at position 297 according to the EU index in Fc can also be used. Specifically, a cell in which an enzyme involved in the synthesis of GDP-L-fucose or transport thereof to the Golgi body, or an enzyme involved in the binding of core fucose has been decreased or deleted is selected, or a cell obtained by any of various artificial methods can also be used as the host cell.

[0755] Specifically, a cell in which core fucose is controlled can be produced by a method for decreasing or deleting an enzyme activity involved in the sugar chain modification of core fucose, a method for increasing an activity of a core fucose cleavage enzyme, or the like.

[0756] Examples of the enzyme involved in the sugar chain modification of core fucose include an enzyme involved in the synthesis or transport of GDP-L-fucose, and an enzyme involved in the binding of core fucose to an N-glycoside-linked complex sugar chain.

[0757] Specific examples of the enzyme involved in the synthesis of GDP-L-fucose or the transport thereof to the Golgi body include GDP-mannose 4,6-dehydratase (hereinafter referred to as GMD), GDP-4-keto-6-deoxy-D-mannose-3,5-epimerase (hereinafter referred to as Fx), GDP-beta-L-fucose pyrophosphorylase (GFPP), fucokinase, GDP-L-fucose transporter, and the like.

[0758] Examples of the enzyme involved in the binding of core fucose include α1,6-fucosyltransferase (hereinafter referred to as FUT8), and the like.

[0759] In the cell that produces the IgG half-molecule, one of the above-mentioned enzyme activities may be decreased or deleted or a plurality of enzyme activities may be combined and decreased or deleted.

[0760] Examples of the method for decreasing or deleting the above-mentioned enzyme activities include (a) a method for gene disruption targeting the gene of the enzyme; (b) a method for introducing a dominant-negative mutant of the gene of the enzyme; (c) a method for introducing a mutation into the enzyme; (d) a method for suppressing transcription or translation of the gene of the enzyme; (e) a method for selecting a cell line that is resistant to a lectin and recognizes a sugar chain structure in which the 6-position of N-acetylglucosamine at the reducing end of the N-glycoside-linked sugar chain and the 1-position of fucose are α-linked; and the like.

[0761] Examples of the lectin include a lectin that is bound to α1,6-fucose such as lentil lectin LCA (lentil agglutinin derived from Lens culinaris), pea lectin PSA (pea lectin derived from Pisum sativum), broad bean lectin VFA (agglutinin derived from Vicia faba), and Aleuria aurantia lectin AAL (lectin derived from Aleuria aurantia).

[0762] Specific examples of the cell include FUT8 gene-deficient CHO cells (WO 2005/035556, WO 2002/31140, and WO 2000/061739), Lec13 that has acquired lectin resistance (Somatic Cell and Molecular genetics, 12, 55, 1986), GDP-fucose transporter gene-deficient cells (WO 2003/055102), GDP-mannose 4,6-dehydratase (GMD) gene-deficient cells (WO 2002/31140), WGA lectin resistant cells, LCA lectin resistant cells (WO 2002/31140), and the like.

[0763] In addition to the above-mentioned methods, the IgG half -molecule in which high mannose-two N-linked sugar chain is bound and the amount of core fucose is decreased can also be expressed by inhibiting an enzyme such as mannosidase I or mannosidase II that is an enzyme involved in an N-linked sugar chain synthesis system.

[0764] Further, by using a host cell made to overexpress N-acetylglueosamine transferase III (GnTIII), half-molecule in which a bisecting GlcNAc-bound complex and a hybrid sugar chain are bound, and the amount of core fucose is decreased can also be produced.

[0765] After introduction of the recombinant vector, a transformant that stably expresses the IgG half-molecule is selected by culturing it in a culture medium for animal cell culture containing an agent such as G418 sulfate (hereinafter referred to as G418), cycloheximide (hereinafter abbreviated as CHX), methetrexate (hereinafter abbreviated as MTX) (JP-A-H2-257891).

[0766] Examples of the culture medium for animal cell culture include RPMI 1640 medium (manufactured by Invitrogen, Inc.), GIT medium (manufactured by Nihon Pharmaceutical Co., Ltd.), EX-CELL301 medium, EX-CELL302, EX-CELL325 medium (manufactured by JRH), IMDM medium (manufactured by Invitrogen, Inc.), Hybridoma-SFM medium (manufactured by Invitrogen, Inc.), culture media obtained by adding various. additives such as fetal bovine serum (hereinafter abbreviated as FBS) to these culture media, and the like.

[0767] The IgG half-molecule is expressed and accumulated in a culture supernatant by culturing the obtained transformant in a culture medium. The expression level and the antigen-binding activity of the IgG half-molecule in the culture supernatant can be measured by an ELISA method or the like. In addition, the expression level of the IgG half-molecule produced by the transformant can be improved using a dhfr gene amplification system (JP-A-H2-257891) or the like.

[0768] The method for expressing the IgG half-molecule using an animal cell as the host has been described above, however, the IgG half-molecule can be expressed also in yeast, an insect cell, a plant cell, or an animal individual or a plant individual in the same manner as in the animal cell based on a known technique.

[0769] When yeast is used as the host cell, a microorganism belonging to the genus Saccharomyces, the genus Schizosaccharomyces, the genus Kluyveromyces, the genus Trichosporon, the genus Schwanniomyces, or the like, for example, Saccharomyces cerevisiae, Schizosaccharomyces pombe, Kluyveromyces lactis, Trichosporon pollulans, Schwanniomyces alluviuns, or the like can be examplified.

[0770] As a method for introducing the recombinant vector, any method can be used as long as it is a method for introducing a DNA into yeast, and for example, methods described in an electroporation method (Methods Enzymol., 194, 182, 1990), a spheroplast method (Proc. Natl. Acad. Sci, U.S.A., 84, 1929, 1978), a lithium acetate method a (J. Bacteriology, 153, 163, 1983, Proc. Natl. Acad. Sci. U.S.A., 75, 1929, 1978), and the like are exemplified.

[0771] When an insect cell is used as the host, the IgG half-molecule can be expressed by, for example, a method described in current Protocols in Molecular Biology (Baculovirus Expression Vectors, A Laboratory Manual, W. H. Freeman and Company, New York, 1992), Bio/Technology, 47, 1988, or the like.

[0772] [Step 2]

[0773] The step 2 is a step of culturing the transformant obtained in the step 1 to produce and accumulate the IgG half-molecule in a culture, and collecting the IgG half-molecule from the culture and purifying the IgG half-molecule.

[0774] The first and second IgG half-molecules may be collected from the same transformant, or may be collected from transformants individually expressing each of the first and second IgG half-molecules. Generally, the first and second IgG half-molecules are collected from transformants individually expressing each of the first and second IgG half-molecules, and mixed after purification, whereby the antibody composition is prepared.

[0775] When the host cell prepared in the step 1 has an ability to express the IgG half-molecule, after the IgG half-molecule is introduced into the host cell described below, the cell is cultured, and the target IgG half-molecule can be collected from the culture.

[0776] Further, an animal individual into which a gene is introduced (transgenic non-human animal) or a plant individual into which a gene is introduced (transgenic plant) is prepared by redifferentiation of an animal or plant cell into which a gene is introduced, and the IgG half-molecule may be collected using such an individual.

[0777] When the transformant is an animal individual or a plant individual, the individual is raised or cultivated according to a conventional method to produce and accumulate the IgG half-molecule, and the IgG half-molecule can be collected from the animal individual or the plant individual.

[0778] Examples of the method for producing the IgG half-molecule using an animal individual include a method for producing the target IgG half-molecule in an animal prepared by introducing a gene according to a known method (American Journal of Clinical Nutrition, 63, 639S, 1996; American Journal Nutrition, 63, 627S, 1996; Bio/Technology, 9, 830, 1991).

[0779] In the case of an animal individual, for example, a transgenic non-human animal into which a DNA encoding the IgG half-molecule is introduced is raised to produce and accumulate the IgG half-molecule in the animal, and the IgG half-molecule can be collected from the inside of the animal.

[0780] As a place of production and accumulation in the animal, for example, milk (JP-A-S63-309192), egg, or the like of the animal can be exemplified. As the promoter used at that time, any promoter can be used as long as it enables expression in an animal. For example, an α-casein promoter, a β-casein promoter, a β-lactoglobulin promoter, and a whey acidic protein promoter that are mammary gland cell-specific promoters, and the like are preferably used.

[0781] Examples of the method for producing the half-molecule using a plant individual include a method for cultivating a transgenic plant into which a DNA encoding the IgG half-molecule is introduced according to a known method [Tissue Culture, 20 (1994); Tissue Culture, 21 (1995); and Trends in Biotechnology 15, 45 (1997)] to produce and accumulate the IgG half-molecule in the plant, and collecting the IgG half-molecule from the inside of the plant.

[0782] The IgG half-molecule can be purified in the following manner. When the IgG half-molecule produced by the transformant into which the gene encoding IgG half-molecule is introduced is, for example, expressed as a soluble protein in the cells, after culture is completed, the cells are collected by centrifugation and suspended in an aqueous buffer solution, and thereafter, the cells are homogenized using an ultrasonic homogenizer, a French press, a Manton Gaulin homogenizer, a dynomill, or the like, whereby a cell-free extract is obtained.

[0783] From the supernatant obtained by centrifugation of the edl-free extract, the IgG half-molecule can be purified by a general enzyme isolation and purification method, that is, by using methods such as a solvent extraction method, a salting-out method using ammonium sulfate or the like, a desalting method, a precipitation method using an organic solvent, anion exchange chromatography using a resin such as diethylaminoethyl (DEAE)-sepharose or DIAION HPA-75 (manufactured by Mitsubishi Chemical Corporation), cation exchange chromatography using a resin such as S-Sepharose FF (Pharmacia, Inc.), hydrophobic chromatography using a resin such as butyl sepharose or phenyl sepharose, a gel filtration method using a molecular sieve, affinity chromatography, a chromatofocusing method, and electrophoresis such as isoelectric focusing electrophoresis alone or in combination.

[0784] In the present invention, as the affinity chromatography, affinity chromatography using a CH-binding body or an Fc-binding body is used (Monoclonal Antibodies-Principles and practice, Third edition, Academic Press, 1996, Antibodies-A Laboratory Manual, Cold Spring Harbor Laboratory, 1988).

[0785] Further, when the IgG half-molecule is expressed within the cells forming insoluble body, the cells are collected and homogenized in the same manner, followed by centrifugation, whereby the insoluble body of the IgG half-molecule is collected as a precipitated fraction. The collected insoluble body of the IgG half-molecule is solubilized with a protein denaturing agent. The IgG half-molecule is returned to a normal conformation by diluting or dialyzing the solubilized solution, and thereafter, the IgG half-molecule can be purified by the same isolation and purification method as described above.

[0786] When the IgG half -molecule is secreted extracellularly, the IgG half-molecule or a derivative thereof can be recovered in the culture supernatant. That is, the culture supernatant is obtained by treating the culture by a method such as centrifugation in the same manner as described above, and the IgG half-molecule can be purified from the culture supernatant using the same isolation and purification method as described above.

[0787] Specifically, the CH-binding body or the Fc-binding body may be any material such as a protein or a resin as long as it binds to CH or Fc, and examples thereof include an Fc-binding protein, an antibody that binds to an H chain constant region (CH) of an antibody, and the like.

[0788] Example of the Fc-binding protein include Protein A derived from Staphylococcus Aureus Protein G derived from hemolytic Streptococcus, an Fc receptor and the subclasses thereof (FcγRI, IIA, IIB, IIIA, and IIIB) and binding portion fragments thereof, and the like.

[0789] Examples of the antibody that binds to CH include antibodies that bind to a CH1 domain, a hinge domain, a CH2 domain, or a CH3 domain.

[0790] In the present invention, more preferred examples of the CH-binding body include Protein A, Protein G, an anti-CH1 antibody, and binding portion fragments thereof.

[0791] As the method for purifying the IgG half-molecule, for example, the culture supernatant obtained by culturing using the transformant described above in [Step 1] (6) is loaded onto a Protein A column or a Protein G column, and thereafter, the column is washed with a phosphate buffer (phosphate buffet saline, hereinafter abbreviated as PBS).

[0792] Thereafter, the IgG half-molecule is eluted from the column using a citric acid buffer at low pH (pH 2.0 to 6.0) or the like, and the eluate is neutralized with an alkaline Tris buffer or the like. The neutralized eluate is subjected to dialysis using a sufficient amount of PBS or the like, whereby the purified IgG half-molecule can be obtained.

[0793] The molecular weight of the purified IgG half-molecule can be measured using polyacrylamide gel electrophoresis [Nature, 227, 680 (1970)], Western blotting [Monoclonal Antibodies-Principles and practice, Third edition, Academic Press (1996), Antibodies—A laboratory Manual, Cold Spring Harbor Laboratory (1988)], or the like.

[0794] [Step 3]

[0795] The step 3 is a step of mixing the first and second IgG half-molecules collected and purified in the step 2, thereby obtaining the antibody composition. It is preferred that the mixing ratio of the first and second IgG half-molecules is appropriately set according to a binding activity to an antigen, a binding activity to an antigen-positive cultured cell line, the strength of the CD16a-binding activity in each CD16a-binding domain, an interaction between the CH3 of the first IgG half-molecule and the CH3 of the second IgG half-molecule, or the like.

[0796] Further, the antibody composition of the present invention can also be produced as an antibody composition in which the first and second IgG half-molecules are mixed by simultaneously expressing the recombinant vectors for expression of the first and second IgG half-molecules in the host cell and performing purification. In this case, as for the mixing ratio of the first and second IgG half-molecules, an antibody composition having a desired mixing ratio can be produced by controlling the expression level of the gene encoding each half-molecule. In addition, the genes encoding the first second IgG half-molecules may be expressed by the same recombinant expression vector or may be expressed by separate recombinant expression vectors.

[0797] 4. Evaluation or Activity of Antibody Composition

[0798] As a method for measuring the protein amount of the purified IgG half-molecule, an FcR-binding activity, a C1q-binding activity, an antigen-binding activity, or cellular cytotoxicity such as an ADCC activity or a CDC activity of the antibody composition constituted by the IgG half-molecule, known methods described in, for example, Molecular Cloning 2nd Edition, Current Protocols in Molecular Biology; Antibodies, A Laboratory manual, Cold Spring Harbor Laboratory, 1988; Monoclonal Antibodies: principles and practice, Third Edition, Acad. Press, 1993; Antibody Engineering A Practical Approach, IRL Press at Oxford University Press, 1996, and the like are exemplified.

[0799] As a specific example, the binding activity of the antibody composition to an antigen or the binding activity thereof to an antigen-positive cultured cell line can be measured by an ELISA method, a fluorescent antibody method (Cancer Immunol. Immunother, 36, 373, 1993), or the like. The cellular cytotoxicity against an antigen-positive cultured cell line be evaluated by measuring a CDC activity, an ADCC activity, or the like (Cancer Immunol. Immunother, 36, 373, 1993; US Patent Application Publication No. 2004/0259150).

[0800] Whether or not the antibody composition has a binding activity to CD16a can be confirmed by producing a recombinant CD16a protein and then measuring binding activity (US Patent Application Publication No. 2004/0259150).

[0801] Example of the method for measuring an ADCC activity include a method in which a target cell labeled with a radioisotope, a fluorescent substance, a dye, or the like, the antibody composition, and an effector cell are brought into contact with one another, and then, the activity of the labeling substance released from the damaged target cell or the biological activity or the like of an enzyme released therefrom is measured, and the like.

[0802] Example of the method for measuring a CDC activity include a method in which a target cell labeled with a radioisotope, a fluorescent substance, a dye, or the like, the antibody composition, and a biological sample such as serum containing a complement component are brought into contact with one another, and then, the activity of the labeling substance released from the damaged target cell or the biological activity of an enzyme released therefrom is measured, and the like.

[0803] 5. Analysis of Sugar Chain Structure

[0804] The sugar chain structure of the IgG half-molecule expressed in various types of cells can be analyzed according to a general analysis of a sugar chain structure of a glycoprotein.

[0805] For example, a sugar chain bound to the IgG half-molecule is constituted by a neutral sugar such as galactose (Gal), mannose (Man), or fucose (Fuc), an amino sugar such as N-acetylglucosamine (GlcNAc), or an acidic sugar such as sialic acid (Sial), and can be analyzed using a technique such as a sugar chain structure analysis using a sugar composition analysis and a two-dimensional sugar chain mapping method.

[0806] (1) Neutral Sugar and Amino Sugar Composition Analysis

[0807] A composition analysis of a sugar chain of the IgG half-molecule can be carried out by performing acid hydrolysis of a sugar chain with trifluoroacetic acid or the like to release a neutral sugar or an amino sugar and analyzing the composition ratio thereof.

[0808] Specific examples of the method include a method using a sugar composition analyzer manufactured by Dionex Corporation, BioLC is a device for analyzing a sugar composition by an HPAEC-PAD (high performance anion-exchange chromatography-pulsed amperometric detection) method (J. Liq. Chromatogr. 6, 1577, 1983).

[0809] Further, a composition ratio can also be analyzed by a fluorescence labeling method using 2-aminopyridine. Specifically, a sample that is acid-hydrolyzed according to a known method [Agric. Biol. Chem., 55(1), 283-284, 1991] is fluorescently labeled by 2-aminopyridylation, and a composition ratio can be calculated by performing an HPLC analysis.

[0810] (2) Sugar Chain Structure Analysis

[0811] The structure analysis of a sugar chain in the IgG half-molecule can be carried out by a two-dimensional sugar chain mapping method (Anal. Biochem., 171, 73, 1988; Biochemical Experimentation Methods 23-Methods of Studies on Glycoprotein Sugar Chains, Japan Scientific Societies Press, edited by Reiko Takahashi, 1989). The two-dimensional sugar chain mapping method is, for example, a method for deducing a sugar chain structure by plotting the retention time or elution position of a sugar chain by reverse-phase chromatography on the X axis and the retention time or elution position of the sugar chain by normal-phase chromatography on the Y axis, respectively, and comparing them with results of those of known sugar chains.

[0812] Specifically, a sugar chain is released from the IgG half-molecule by hydrazinolysis of the IgG half-molecule and fluorescence labeling of the sugar chain with 2-aminopyridine (hereinafter abbreviated as PA) (J. Biochem., 95, 197, 1984) is performed, and thereafter, the sugar chain is separated from an excess amount of a PA-treating reagent by gel filtration, followed by reverse-phase chromatography, Then, each peak of the fractionated sugar chain is subjected to normal-phase chromatography. The sugar chain structure can be deduced by plotting on a two-dimensional sugar chain map based on these results and comparing them with the spots of a sugar chain standard (manufactured by TaKaRa, Inc.) or those in literature (Anal. Biochem., 171, 73, 1988).

[0813] Further, mass spectrometry such as MALDI-TOF-MS of each sugar chain is performed, and the structure deduced by the two-dimensional sugar chain mapping method can be continued.

[0814] Which portion of Fc of the IgG half-molecule a sugar chain is bound to can be confirmed by treating the IgG half-molecule subjected to reductive alkylation with an endoprotease such as trypsin, pepsin, Lys-C, Asp-N, and separating the resultant by reverse-phase chromatography (LC), followed by an analysis using a mass spectrometer (MS) or the like.

[0815] In other words whether or not a sugar chain is actually bound can be confirmed by whether or not the molecular weight of a peptide that can be produced by a protease treatment and the molecular weight of a peptide to which the sugar chain is bound match the MS analytical values based on the amino acid sequence of the Fc of the target IgG half-molecule.

[0816] 6. Method for Identifying Sugar Chain Structure

[0817] The ratio of sugar chains having no core fucose among all the N-glycoside-linked complex sugar chains bound to Fc in the IgG half-molecule can be identified using the method for analyzing a sugar chain structure described in the above 5. In addition, it can also be identified by an immunological quantitative method using a lectin.

[0818] The identification of a sugar chain structure in the IgG half-molecule by an immunological quantitative method using a lectin can be carried out according to an immunological quantitative method such as Western staining, RIA (radioimmunoassay), VIA (viroimmunoassay), EIA (enzymoimmunoassay), FIA (fluoroimmunoassay), or MIA (metalloimmunoassay) described in literature [Monoclonal Antibodies: Principles and Applications, Wiley-Liss, Inc. (1995); Enzyme Immunoassay; 3rd Ed., IGAKU-SHOIN Ltd. (1987); Enzyme Antibody Technique, Revised Edition, Gakusai Kikaku (1985)], or the like, for example, in the following manner.

[0819] A lectin that recognizes the sugar chain structure of the IgG half-molecule is labeled, and the labeled lectin and the antibody composition that is a sample are allowed to react with each other. Subsequently, the amount of a complex of the labeled lectin with the antibody composition is measured.

[0820] Examples of the lectin used for identification of the sugar chain structure of the IgG half-molecule include WGA (wheat-germ agglutinin derived from T. vulgaris), ConA (concanavalin A derived from C. ensiformis), RIC (a toxin derived from R. communis), L-PHA (leucoagglutinin derived from P. vulgaris), LCA (lentil agglutinin derived from L. culinaris), PSA (pea lectin derived from P. sativum), AAL (Aleuria aurantia Lectin), ACL (Amaranthus caudatus Lectin), BPL (Bauhinia pupurea Lectin), DSL (Datura stramonium Lectin), DBA (Dolichos biflorus Agglutinin), EBL (Elderberry Balk Lectin), ECL (Erythrina cristagalli Lectin), EEL (Euonymus europaeus Lectin), (Galanthus nivalis Lectin), GSL (Griffonia simplicifolia Lectin), HPA (Helix pomatia Agglutinin), HHL (Hippeastrum Hybrid Lectin), Jacalin, LTL (Lotus tetragonolobus Lectin), LEL (Lycopersicon esculentum Lectin), MAL (Maackia amurensis Lectin), MPL (Maclura pomifera Lectin), NPL (Narcissus pseudonarcissus Lectin), PNA (Peanut Agglutinin), E-PHA (Phaseolus vulgaris Erythroagglutinin), PTL (Psophocarpus tetragonolobus Lectin), RCA (Ricinus communis Agglutinin), STL (Solamum tuberosum Lectin), SJA (Sophora japonica Agglutinin), SBA (Soybean Agglutinin), UEA (Ulex europaeus Agglutinin), VVL (Vicia villosa Lectin), and WFA (Wisteria floribunda Agglutinin).

[0821] A lectin that specifically recognizes core fucose is preferably used, and specific examples thereof include lentil lectin LCA (lentil agglutinin derived from Lens culinaris), pea lectin PSA (pea lectin derived from Pisum sativum), broad bean lectin VFA (agglutinin derived from Vicia faba), and Aleuria aurantia lectin AAL (lectin derived from Aleuria aurautia).

[0822] 7. Use of Antibody Composition of the Present Invention

[0823] The antibody composition of the present invention can recognize two types of antigens that are different from each other by including the first and second IgG half-molecules having antigen-binding domains for antigens that are different from each other. Therefore, a pharmaceutical composition containing the antibody composition of the present invention can have a molecular form in accordance with two different types of target antigens, and thus can exhibit high specificity for a double-positive cell that expresses the two types of antigens.

[0824] When the antibody composition of the present invention is used for a pharmaceutical composition, it is preferred that the antibody composition has the following properties [1] to [3]. The following properties [1] to [3] can serve as indices for selecting excellent antibody composition in the present invention.

[0825] [1] High Specificity for Double-Positive Cell

[0826] [2] Enhanced Effector Function

[0827] [3] Blood Half-Life Comparable to that of Wild-Type IgG Antibody

[0828] Hereinafter, the respective properties wiil be described.

[0829] [1] High Specificity for Double-Positive Cell

[0830] The antibody composition of the present invention having high specificity for a double-positive cell as compared with a single-positive cell can be selected, for example, by a method including the following steps (1a) to (1d).

[0831] (1a) The first IgG half-molecule in which each of an amino acid alteration for deleting an inter-H chain disulfide bond in a hinge domain, an amino acid alteration for attenuating a CD16a-binding activity in a first CD16a-binding domain, and an amino acid alteration for attenuating inter-CH3 domain interaction is introduced is produced.

[0832] (1b) The second IgG half-molecule in which each of an amino acid alteration for deleting an inter-H chain disulfide bond in a hinge domain, an amino acid alteration for attenuating is CD16a -binding activity in a second CD16a-binding domain, and an amino acid alteration the attenuating an inter-CH3 domain interaction is introduced is produced in the same manner as in (1a).

[0833] (1c) A double-positive cell that expresses first and second antigens, a single-positive cell that expresses the first antigen, and a single-positive cell that expresses the second antigen are prepared.

[0834] In order to use cells in which the expression level of the antigen in each cell is adjusted, each antigen transfectant may be prepared. The effector function of the antibody composition in which the first IgG half-molecule and the second IgG half-molecule are mixed is evaluated for each cell.

[0835] (1d) An antibody composition having high specificity for the double-positive cell as compared with the single-positive cells is obtained by selecting an antibody composition having a strong effector function for the double-positive cell as compared with the effector function for each of the single-positive cells based on the results of evaluation in (1c).

[0836] As a specific method, for example, a method described below in [Example 3] is exemplified. Specifically, for example, when the effector function is an ADCC activity, an antibody composition having high specificity for the double-positive cell as compared with the singe positive cells can be obtained by selecting an antibody composition having a strong effector function for the double-positive cell as compared with the effector function for each of the single-positive cells as follows.

[0837] 1-i) As the target cell, the single-positive cell that expresses the first antigen, the single-positive cell that expresses the second antigen, and the double-positive cell that expresses the first antigen and the second antigen are used. The expression levels of the first antigen and the second antigen in each cell are measured using a flow cytometer, and it is confirmed that the target antigen is expressed in the cell.

[0838] 1-ii) As the effector cell, a human peripheral blood mononuclear (PBMC) or a human CD16a-expressing which is transfected with a gene encoding human CD16a to stably express the gene, and the target cell are prepared using a culture medium (for example, RPMI medium).

[0839] 1-iii) The cells are left to stand for about 2 to 6 hours in a CO₂ incubator. At the same time, a solubilizing solution (for example, an aqueous solution containing an acid, an alkali, a surfactant, or the like) is added to a 100% reaction well, and the target cells are completely lysed. After the reaction container is centrifuged, the supernatant is collected and dispensed into an ELISA plate. A coloring solution is applied thereto to cause a reaction, and thereafter, a stopping solution is added thereto, and an absorbance (A450) is measured using a plate reader.

[0840] 1-iv) The ADCC activity (%) is calculated using the following formula.

ADCC activity(%)=100×(S−E−T)/(Max−T)

[0841] S=absorbance of sample reaction—absorbance of culture medium well

[0842] E=absorbance of effector—absorbance of culture medium well

[0843] T=absorbance of target well—absorbance of culture medium well

[0844] Max=100% reaction well—100% reaction control well

[0845] 1-vi the positive control antibody, a normal IgG1-type antibody against the first antigen and a normal IgG1-type antibody against the second antigen are used. It is confirmed that the normal IgG1-type antibody against the first antigen exhibits ADCC activity against the single-positive cell that expresses the first antigen, and the normal IgG1-type antibody against the second antigen exhibits an ADCC activity against the single-positive cell that expresses the second antigen.

[0846] On the Other band, when an antibody solution obtained by mixing a half-molecule of the antibody against the first antigen and a half-molecule of the antibody against the second antigen does not exhibit an ADCC activity against the single-positive cell that expresses the first antigen and the single-positive cell that expresses the second antigen, and specifically exhibits an ADCC activity only against the double-positive cell that expresses the first antigen and the second antigen, it in evaluated to he an antibody composition having a strong effector function fur the double-positive cell as compared with the effector function for each of the single-positive cells.

[0847] As one aspect of the case where “an antibody solution obtained by mixing a half-molecule of the antibody against the first antigen and a half-molecule of the antibody against the second antigen does not exhibit an ADCC activity against the single-positive cell that expresses the first antigen and the single-positive cell that expresses the second antigen, and specifically exhibits ADCC activity only against the double-positive cell that expresses the first antigen and the second antigen”, for example, a ease where the ADCC activity against the single-positive cell that expresses the first antigen and the single-positive cell that expresses the second antigen is comparable to the ADCC activity of the negative control, and also the ADCC activity against the double-positive cell that expresses the first antigen and the second antigen is comparable to the ADCC activity of the positive control is exemplified. As another aspect, for example, a case where the ADCC activity against the single-positive cell that expresses the first antigen and the single-positive cell that expresses the second antigen is attenuated as compared with the ADCC activity of the positive control, and also the ADCC activity against the double-positive cell that expresses the first antigen and the second antigen is comparable to the ADCC activity of the positive control is exemplified.

[0848] Here, the description “the ADCC activity is comparable” means that the ADCC activity is within a range of preferably ±0 to 50%, and more preferably ±0 to 30% with respect to the ADCC activity of the control, and the description “the ADCC activity is attenuated” means that the ADCC activity is within a range of preferably 0 to 60%, and more preferably 0 to 30% with respect to the ADCC activity of the control.

[0849] As the negative control at this evaluation, it is preferred to use the antibody against the first antigen and the antibody against the second antigen. The antibody against the first antigen exhibits an effector function for the double-positive cell and the single-positive cell that expresses the first antigen, and the antibody against the second antigen exhibits an effector function for the double-positive cell and the single-positive cell that expresses the second antigen.

[0850] Further, in place of each antigen-expressing cell, a bead or the like with each antigen fixed thereto can be used. For example, a double-positive bead with the first antigen and the second antigen fixed thereto, a single-positive bead with only the first antigen fixed thereto, and a single-positive bead with only the second antigen fixed thereto are prepared. To each bead, the antibody composition of the present invention is added, and thereafter, further a recombinant CD16a protein is added thereto. Thereafter, by examining the binding activity of the recombinant CD16a protein to the antibody composition bound onto the double-positive bead and two single-positive beads, an antibody composition having high selectivity for both target antigens can be selected. As a method for measuring an interaction with the recombinant CD16a protein, a binding ELISA method, a surface plasmon resonance method, or the like can be used.

[0851] [2] Enhanced Effector Function

[0852] The antibody composition of the present invention having an enhanced effector function can be selected, for example, by a method including the following steps (2a) to 2(c).

[0853] (2a) The effector function of the antibody composition having high specificity for the double-positive cell as compared with the single-positive cells selected by the method described in the above [1] is enhanced.

[0854] As a means for enhancing the effector function of the antibody composition of the present invention having high specificity for the double-positive cell selected by the method described in the above [1], for example, performing an amino acid alteration for enhancing the CD16a-binding activity, and/or decreasing the content of the core fucose bound to Fc or deleting the core fucose is exemplified.

[0855] When an amino acid residue substitution for enhancing the CD16a-binding activity is introduced, the amino acid residue may be any as long as it is an amino acid residue contained in the CD16a domain formed in the hetero assembly of the IgG half-molecules.

[0856] Further, the amino acid residue substitution may be introduced into both the first and second IgG half-molecules or may be introduced into either one of them. However, in order to achieve the effect of the present invention in, the same IgG half-molecule, it is preferred that the position of the amino acid residue substitution for enhancing the CD16a-binding activity and the position of the amino acid residue substitution for attenuating the CD16a-binding activity different.

[0857] In other words, if the IgG half-molecules are mutually different, the position of the amino acid residue substitution for enhancing the CD16a-binding activity and the position of the amino acid residue substitution for attenuating the CD16a-binding activity may be the same.

[0858] Which position the amino acid residue substitution for enhancing me CD16a-binding activity is introduced into can be determined by producing hetero assemblies composed of various IgG half-molecules in combination with the position or the amino acid residue substitution for attenuating the CD16a-binding activity measuring the ADCC activity or the like, and evaluating that the activity is an activity specific for the double-positive cells

[0859] The effector function can be enhanced by decreasing the content of the core fucose bound to Fc or deleting the core fucose in addition to the amino acid residue substitution for enhancing the CD16a-binding activity.

[0860] (2 b) With respect to the antibody composition with a effector function enhanced in (2a), the effector function (for example, the ADCC activity or the like) for the single-positive cell that expresses the first antigen, the single-positive cell that expresses the second antigen and the double-positive cell that expresses the first and second antigens is evaluated.

[0861] (2c) An antibody composition having an enhanced effector function specific for the double-positive cell is obtained by selecting an antibody composition having a strong effector function for the double-positive cell as compared with the effector function for each of the single-positive cells based on the results of evaluation in (2b).

[0862] By the above-mentioned method, an antibody composition having an enhanced effector function and exhibiting high specificity for the double-positive cell can be selected.

[0863] The antibody composition having an enhanced effector function specific for the double-positive cell can be evaluated for an effector function closer to a clinical effect by an evaluation system mimicking human blood. As the evaluation system mimicking human blood, for example, an ADCC evaluation system in which a protein component of blood such as human albumin, an immunoglobulin, human plasma, or human serum and human NK cells, human peripheral blood mononuclear cells (PBMC), human granulocytes, or the like are added, a cellular cytotoxicity evaluation system using human whole blood, and the like are exemplified.

[0864] Examples of a specific method for the evaluation system mimicking human blood include a method using an ADCC evaluation system described below in [Example 8] and a method using a cellular cytotoxicity evaluation system described below in [Example 9].

[0865] As the method using an ADCC evaluation system, specifically, for example, the following method is exemplified. The ADCC activity is measured and evaluated in the same manner as in 1-i) to 1-vi) except that in the above-mentioned 1-ii), an evaluation system mimicking the internal human body is constructed by adding immunoglubulin at a final concentration of preferably 0.01 to 10 mass %, more preferably 0.1 to 10 mass %, and further more preferably 1 to 4 mass %.

[0866] As the method using a cellular cytotoxicity evaluation system by a human blood reconstitution system, specifically, for example, the following method is exemplified.

[0867] 2-i) As the target cell, the single-positive cell that expresses the first antigen, the single-positive cell that expresses the second antigen, and the double-positive cell that expresses the first antigen and the second antigen are used. The expression levels of the first antigen and the second antigen in each cell are measured using a flow cytometer, and it is confirmed that the target antigen is expressed in the cell.

[0868] 2-ii) Plasma is obtained by centrifuging human blood and recovering the supernatant. Further, a fraction of peripheral blood mononuclear cells and granulocytes is obtained from the human blood using a red blood cell depletion reagent (for example, Hetasep: Stemcell technology, #07806).

[0869] 2-iii) The plasma and the fraction of peripheral blood mononuclear cells and granulocytes recovered in 2-ii) are mixed, and the mixture is seeded in a cell culture plate, and thereafter, an antibody composition obtained by mixing a half-molecule of the antibody against the first antigen and a half-molecule of the antibody against the second antigen is added thereto, and the cells are cultured at 37°0 C. for about 12 to 48 hours.

[0870] 2-iv) The ratio of the double-positive cell that expresses the first antigen and the second antigen is measured by flow cytometry. As the negative control, a wild-type IgG antibody is used.

[0871] As a result, when the antibody composition obtained by mixing a half-molecule the antibody against the first antigen and a half-molecule of the antibody against the second antigen removes the double-positive cell that expresses the first antigen and the second antigen in an antibody concentration-dependent manner, but does not remove the single-positive cell that expresses the first antigen and the single-positive cell that expresses the second antigen, it is evaluated that the effector function specific for the double-positive cell is enhanced.

[0872] The description “removes the double-positive cell” means that the ratio of the double-positive cell that expresses the first antigen and the second antigen when the antibody composition of the present invention is added is lower than the ratio in the case of the negative control. The description “the ratio or the double-positive cell is lower” means that it is within a range of preferably 0 to 70%, and more preferably 0 to 50% with respect to the ratio of the double-positive cell in the case of the negative control.

[0873] The description “does not remove the single-positive cell” means that the ratio of the single-positive cell that expresses the first antigen and the single-positive cell that expresses the second antigen when the antibody composition of the present invention is added is comparable to the ratio in the of the negative control. The description “the ratio of the single-positive cell is comparable” means that it is within a range of preferably ±0 to 40%, and more preferably ±0 to 20% with respect to the ratio of the single-positive cell in the case of the negative control.

[0874] By this evaluation, an antibody composition that exhibits an enhanced effector function even in human blood can he selected.

[0875] (3) The antibody composition having both high specificity for the double-positive cell and an enhanced effector function selected using the above-mentioned method in [1] and [2] is subjected to PK studies (pharmacokineties and pharmacodynamics studies) using an animal such as a mouse or a monkey.

[0876] As the negative control, a wild-type IgG antibody is used.

[0877] (3b). As a result of the PK studies in (3a), an antibody composition that exhibits kinetics close to that of the wild-type IgG antibody is selected as an antibody composition haying a blood half-life comparable to that of the wild-type IgG antibody. As a specific method, for example, a method described below in [Example 7] is exemplified.

[0878] As the method for the PK studies, specifically, for example, the following method is exemplified.

[0879] 3-i) After the antibody composition (preferably 0.1 to 10 mg/kg) having both high specificity for the double-positive coil and an enhanced effector function is administered to a mouse (for example, BALB/c mouse) through the tail vein, the blood is collected preferably after 1 hour, 4 hours, 24 hours, and 72 hours. After piercing the cheek with a lancet under isoflurane anesthesia and collecting the blood, serum is recovered by centrifuging the blood at preferably 4,000 to 16,000 rpm at room temperature preferably for 5 to 20 minutes with a micro blood collection tube [for example, Microtainer (registered trademark) manufactured by BD Company]. As the positive control antibody, a wild-type IgG antibody is used.

[0880] 3-ii) The concentration of the antibody present in the serum is measured. The concentration of the antibody in the serum can be measured by a known method, and for example, the measurement can be carried out using AlphaLISA Human Kappa light chain immunoassay kit (AL3023, PerkinElmer), and a calibration curve can be created with Kappa light chain in the kit.

[0881] 3-iii) An antibody composition in which the blood half-life (t1/2) that can be calculated from the concentration of the antibody measured in 3-ii) is within a range of preferably 50% to 150% as compared with that of the wild-type IgG antibody as the positive control is evaluated to be an antibody composition having a blood half-life comparable to that of the wild-type IgG antibody.

[0882] The antibody composition having a long blood half-life can be selected also by measuring the denaturation midpoint (Tm) value by differential scanning calorimetry (DSC) as a physicochemical characteristic of an antibody in place of the PK studies using an animal.

[0883] Among the antibody compositions of the present invention, those having a Tm value (denaturation midpoint temperature) comparable to that of the wild-type IgG antibody exhibit favorable PK. As specific method for measuring the Tm value, for example, a method described below in [Example 7] is exemplified. Specifically, the measurement can be carried out by differential scanning fluorimetry (DSF), and as a measuring apparatus, for example, Prometheus NT48 of NanoTemper Technologies GmbH is exemplified. The measurement of the Tm value of the antibody can be carried out preferably by elevating the temperature to 80° C. to 100° C. starting from 10° C. to 30° C. at a temperature elevation rate of preferably 0.5° C. to 2° C./min.

[0884] Further, it is known that the higher the binding activity at pH 6.0 of the antibody to FcRn (neonatal Fc receptor) is, the longer the blood half-life is. Therefore, by measuring the binding activity to FcRn, an antibody composition having a long blood half-life can be selected. The binding activity to FcRn can be measured, for example, by a method disclosed in J. Immunol. 2002; 169: 5171-80.

[0885] By the evaluation in [1] to [3] described above, an antibody composition having preferred properties when it is used in a pharmaceutical product can be selected. A combination of amino acid residue substitutions included in the preferred antibody composition of the present invention having such properties is preferably a combination shown in Table 2, more preferably a combination shown in Table 3A or 3B, and most. preferably a combination shown in Table 4.

TABLE 2

| Domain | Purpose of amino acid | Combination of amino acid residue substitutions | |
|---|---|---|---|
| name | residue substitution | First IgG half-molecule | Second IgG half-molecule |
| Hinge | To form hetero assembly | C226A/C229A | |
| CH2 | To bind to CD16a only when | D265A, S267K, Y296P, S298E, or S239R | P329Y |
| | hetero assembly is formed | | |

| | | |
|---|---|---|
| CH2 | To enhance CD16a binding | S239D, S239E, S239D/K326T, S239D/A330F, S239D/K326E, S239E/I332E, |
| | activity | S208A/E33A/K334A/H268E, or S239D/S298A/E333A/L242C/K334C |
| CH3 | To form hetero assembly | Y349A, L351A, T366A, L368A, D399A, F405A, Y407A, K409A, or K409R |

TABLE 3A

| Domain | Purpose of amino acid | Combination of amino acid residue substitutions | |
|---|---|---|---|
| name | residue substitution | First IgG half-molecule | Second IgG half-molecule |
| Hinge | To form hetero assembly | C226A/C229A | |
| CH2 | To bind to CD16a only when | D265A | P329Y |
| | hetero assembly is formed | | |

| | | |
|---|---|---|
| CH2 | To enhance CD16a binding | S293D/K326T or S239D/S296A/E333A/L242C/K334C |
| | activity | |
| CH3 | To form hetero assembly | L368A, Y407A, or K490R |

TABLE 3B

| Domain | Purpose of amino acid | Combination of amino acid residue substitutions | |
|---|---|---|---|
| name | residue substitution | First IgG half-molecule | Second IgG half-molecule |
| Hinge | To form hetero assembly | C226A/C229A | |
| CH2 | To bind to CD16a only when | S296E | P329Y |
| | hetero assembly is formed | | |

| | | |
|---|---|---|
| CH2 | To enhance CD16a binding | S293D/K326T or S239D/S298A/E333A/L242C/K334C |
| | activity | |
| CH3 | To form hetero assembly | L368A, Y407A, or K409R |

[0886] That is, combinations of amino residue substitutions shown in Tables 3A and 3B are as follows.

[0887] First IgG Half-Molecule>

[0888] 1) C226A, C229A, D265A, S239D, K326T, L368A

[0889] 2) C226A, C229A, D265A, S239D, K326T, Y407A

[0890] 3) C226A, C229A, D265A, S239D, K326T, K409R

[0891] 4) C226A, C229A, D265A, S219D, S298A, E333A, L242C, K334C, L368A

[0892] 5) C226A, C229A, D265A, S239D, S298A, E333A, L242C, K334C, Y407A

[0893] 6) C226A, C229A, D265A, S239D, S298A, E333A, L242C, K334C, K409R

[0894] 7) C226A, C229A, S298E, S239D, K326T, L368A

[0895] 8) C226A, C229A, S298E, S239D, K326T, Y407A

[0896] 9) C226A, C229A, S298E, S239D, K326T, K409R

[0897] 10) C226A, C229A, S298E, S239D, E333A, L242C, K334C, L368A

[0898] 11) C226A, C229A, S298E, S239D, E333A, L242C, K334C, Y407A

[0899] 12) C226A, C229A, S298E, S239D, E333A, L242C, K334C, K409R

[0900] Second IgG Half-Molecule>

[0901] 1) C226A, C229A, P329Y, S239D, K326T, L368A

[0902] 2) C226A, C229A, P329Y, S239D, K326T, Y407A

[0903] 3) C226A, C229A, P329Y, S239D, K326T, K409R

[0904] 4) C226A, C229A, P329Y, S239D, S298A, E333A, L242C, K334C, L368A

[0905] 5) C226 A, C229A , P329Y, S239D, S295A, E333A, L242C, K334C, Y407A

[0906] 6) C226A, C229A, P329Y, S239D, S298A, E333A, L242C, K334C, K409R

[0907] The antibody composition of the present invention preferably contains the second IgG half-molecule [1) to 6)] with the same number with respect to the first IgG half-molecule [1) to 6)]. Further, the antibody composition of the present invention preferably contains the second IgG half-molecule so that the combination thereof with the first IgG half-molecule [7) to 12)] becomes as follows.
[0908] the first IgG half-molecule 7) and the second IgG half-molecule 1)
[0909] the first IgG half-molecule 8) and the second IgG half-molecule 2)
[0910] the first IgG half-molecule 9) and the second IgG half-molecule 3)
[0911] the first IgG half-molecule 10) and the second IgG half-molecule 4)
[0912] the first IgG half-molecule 11) and the second IgG half-molecule 5)
[0913] the first IgG half-molecule 12) and the second IgG half-molecule 6)

[0914] More specifically, as preferred embodiments of the combination of amino acid residue substitutions included in the antibody composition of the present invention, for example, the following <1> to <12> are exemplified.

[0915] <1>

[0916] (2A) Each of the first IgG half-molecule and the second IgG half-molecule includes amino acid residue substitutions of C226A and C229A numbered according to the EU index.

[0917] (3A) The first IgG half-molecule includes an antigen-binding domain that binds to the first antigen and includes an amino acid residue substitution of D265A numbered according to the EU index in the first CD16a-binding domain.

[0918] (4A) The second IgG half-molecule includes an antigen-binding domain that binds to the second antigen and includes an amino acid residue substitution of P329Y numbered according to the EU index in the second CD16a-binding domain.

[0919] (5A) Each of the first IgG half-molecule and the second IgG half-molecule includes amino acid residue substitutions of (a) S239D and K326T numbered according to the EU index.

[0920] (6A) Each of the first IgG half-molecule and the second IgG half-molecule includes L368A numbered according to the index.

[0921] [2]

[0922] (2A) Each of the first IgG half-molecule and the second IgG half-molecule includes amino acid residue substitutions of C226A and C229A numbered according to the EU index.

[0923] (3A) The first IgG half-molecule each includes an antigen-binding domain that binds to the first antigen and includes an amino acid residue substitution of D265A numbered according to the EU index in the first CD16a-binding domain.

[0924] (4A) The second IgG half-molecule includes an antigen-binding domain that binds to the second antigen and includes an amino acid residue substitution of P329Y numbered according to the EU index in the second CD16a-binding domain.

[0925] (5A) Each of the first IgG half-molecule and the second IgG half-molecule includes amino acid residue substitutions of (a) S239D and K326T numbered according to the EU index.

[0926] (6A) Each of the first IgG half-molecule and the second IgG half-molecule includes Y407A numbered according to the EU index.

[0927] <3>

[0928] (2A) Each of the first IgG half-molecule and the second IgG half-molecule includes amino acid residue substitutions of C226A and C229A numbered according to the EU index.

[0929] (3A) The first IgG half-molecule each includes an antigen-binding domain that binds to the first antigen and includes an amino acid residue substitution of D265A numbered according to the EU index in the first CD16A-binding domain.

[0930] (4A) The second IgG half-molecule includes an antigen-binding domain that binds to the second antigen and includes an amino acid residue substitution of P329Y numbered according to the EU index m the second CD16a-binding domain.

[0931] (5A) Each of the first IgG half-molecule and the second IgG half-molecule includes amino acid residue substitutions of (a) S239D and K326T numbered according to the EU index.

[0932] (6A) Each of the first IgG half-molecule and the second IgG half-molecule includes K409R, numbered according to the EU index.

[0933] (2A) Each of the first IgG half-molecule and the second IgG half-molecule includes amino acid residue substitutions of C226A and C229A numbered according to the EU index.

[0934] (3A) The first IgG half-molecule each includes an antigen-binding domain that binds to the first antigen and includes an amino acid residue substitution of D265A numbered according to the EU index in the first CD16a-binding domain.

[0935] (4A) The second half-moleeule includes an antigen-binding domain that binds to the second antigen and includes an amino acid residue substitution of P329Y numbered according to the EU index in the second CD16a-binding domain.

[0936] (5A) Each of the first IgG half-molecule and the second IgG half-molecule includes amino acid residue substitutions of (b) S239D, S298A, E333A, L242C, and K334C numbered according to the EU index.

[0937] (6A) Each of the first IgG half-molecule and the second IgG half-molecule includes L368A numbered according to the EU index.

[0938] <>5

[0939] (2A) Each of the first IgG half-molecule and the second IgG half-molecule includes amino acid residue substitutions of C226A and C229A numbered according to the EU index.

[0940] (3A) The first IgG half-molecule includes an antigen-binding domain that binds to the first antigen and includes an amino acid residue substitution of D265A numbered according to the EU index in the first CD16a-binding domain.

[0941] (4A) The second IgG half-molecule includes an antigen-binding domain that binds to the second antigen and includes an amino acid residue substitution of P329Y numbered according to the EU index in the second CD16a-binding domain.

[0942] (5A) Each of the first IgG half-molecule and the second IgG half-molecule includes amino acid residue substitutions of (b) S239D, S298A, E333A, L242C, and K334C numbered according to the EU index.

[0943] (6A) Each of the first IgG half-molecule and the second IgG half-molecule includes K407A numbered according to the EU index.

[0944] <6>

[0945] (2A) Each of the first IgG half-molecule and the second IgG half-molecule includes amino acid residue substitutions of C226A and C229A numbered according to the EU index.

[0946] (3A) The first IgG half-molecule includes an antigen-binding domain that binds to the first antigen and includes an amino acid residue substitution of D265A numbered according to the EU index in the first CD16a-binding domain.

[0947] (4A) The second IgG half-molecule includes an antigen-binding domain that binds to the second antigen and includes an amino acid residue substitution of P329Y numbered according to the EU index in the second CD16a-binding domain.

[0948] (5A) Each of the first IgG half-molecule and the second IgG half-molecule includes amino acid residue substitutions of (b) S2 39D, S298A, E133A, L242C, and K334C numbered according to the EU index.

[0949] (6A) Each of the first IgG half-molecule and the second IgG half-molecule includes K409R numbered according to the EU index.

[0950] <7>

[0951] (2A) Each of the first IgG half-molecule and the second IgG half-molecule includes amino acid residue substitutions of C226A and C229A numbered according to the EU index.

[0952] (3A) The first IgG half-molecule includes an antigen-binding domain that binds to the first antigen and includes an amino acid residue substitution of S298E numbered according to the EU index in the.first CD16a-binding domain.

[0953] (4A) The second IgG half-molecule includes an antigen-binding domain that binds to the second antigen and includes an amino acid residue substitution of P329Y numbered according to the EU index in the second CD16a-binding domain.

[0954] (5A) Each of the first IgG half-molecule and the second IgG half-molecule includes amino acid residue substitutions of (a) S239D and K326T numbered according to the EU index.

[0955] (6A) Each of the first IgG half-molecule and the second IgG half-molecule includes K409R numbered according to the EU index.

[0956] <8>

[0957] (2A) Each of the first IgG half-molecule and the second IgG half-molecule includes amino acid residue substitutions of C226A and C229A numbered according to the EU index.

[0958] (3A) The first IgG half-molecule includes an antigen-binding domain that binds to the first antigen and includes an amino acid residue substitution of S298E numbered according to the EU index in the first CD16a-binding domain.

[0959] (4A) The second IgG half-molecule includes an antigen-binding domain that binds to the second antigen and includes an amino acid residue substitution of P329Y numbered according to the EU index in the second CD16a-binding domain.

[0960] (5A) Each of the first IgG half-molecule and the second IgG half-molecule includes amino acid residue substitutions of (a) S239D and K326T numbered according to the EU index.

[0961] (6A) Each of the first IgG half-molecule and the second IgG half-molecule includes L368A numbered according to the EU index.

[0962] <9>

[0963] (2A) Each of the first IgG half-molecule and the second IgG half-molecule includes amino acid residue substitutions of C226A and C229A numbered according to the EU index.

[0964] (3A) The first IgG half-molecule each includes an antigen-binding domain that binds to the first antigen and includes an amino acid residue substitution of S298E numbered according to the EU index in the first CD16a-binding domain.

[0965] (4A) The second IgG half-molecule includes an antigen-binding domain that binds to the second antigen and includes an amino acid residue substitution of P329Y numbered according to the EU index in the second CD16a-binding domain.

[0966] (5A) Each of the first IgG half-molecule and the second IgG half-molecule includes amino acid residue substitutions of (a) S239D and K326T numbered according to the EU index.

[0967] (6A) Each of the first IgG half-molecule and the second IgG half-molecule includes Y407A numbered according to the EU index.

[0968] <10>

[0969] (2A) Each of the first IgG half-molecule and the second IgG half-molecule includes amino acid residue substitutions of C226A and C229A numbered according to the EU index.

[0970] (3A) The first IgG half-molecule each includes an antigen-binding domain that binds to the first antigen and includes an amino acid residue substitution of S298E numbered according to the EU index in the first CD16a-binding domain.

[0971] (4A) The second IgG half-molecule includes an antigen-binding domain that binds to the second antigen and includes an amino acid residue substitution P329Y numbered according to the EU index in the second CD16a-binding domain.

[0972] (5A) The first IgG half-molecule includes amino acid residue substitutions of S239D, E333A, L242C, and K334C numbered according to the EU index, and the second IgG half-molecule includes amino acid residue substitutions of S239D, S298A, E333A, L242C, and K334C numbered according to the EU index.

[0973] (6A) Each of the first IgG half-molecule and the second IgG half-molecule includes L368A numbered according to the EU index.

[0974] <11>

[0975] (2A) Each of the first IgG half-molecule and the second IgG half-molecule includes amino acid residue substitutions of C226A and C229A numbered according to the EU index.

[0976] (3A) The first IgG half-molecule includes an antigen-binding domain that binds to the first antigen and includes an amino acid residue substitution of S298E numbered according to the EU index in the first CD16a-binding domain.

[0977] (4A) The second IgG half-molecule includes an antigen-binding domain that binds to the second antigen and includes an amino acid residue substitution of P329Y numbered according to the EU index in the second CD1 6a-binding domain.

[0978] (5A) The first IgG half-molecule includes amino acid residue substitutions of S239D, E333A, L242C, and K334C numbered according to the EU index, and the second IgG half-molecule includes amino acid residue substitutions S239D, S2 98A, E333A, L242C, and K334C numbered according to the EU index.

[0979] (6A) Each of the first IgG half-molecule and the second IgG half-molecule includes Y407A numbered according to the EU index.

[0980] [12]

[0981] (2A) Each of the first IgG half-molecule and the second IgG half-molecule includes amino acid residue substitutions of C226A and C229A numbered according to the EU index.

[0982] (3A) The first IgG half-molecule includes an antigen-binding domain that binds to the first antigen and includes an amino acid residue substitution of S298E numbered according to the EU index in the first CD16a-binding domain.

[0983] (4A) The second IgG half-molecule includes an antigen-binding domain that binds to the second antigen and includes an amino acid residue substitution of P329Y numbered according to the EU index in the second CD16a-binding domain.

[0984] (5A) The first IgG half-molecule in amino acid residue substitutions of S239D, E333A, L242C, and K334C numbered according to the EU index, and the second IgG half-molecule includes amino acid residue substitutions of S239D, S298A, E333A, L242C, and K334C numbered according to the EU index.

[0985] (6A) Each of the first IgG half-molecule and the second IgG half-molecule includes K409R numbered according to the EU index.

TABLE 4

| Domain | Purpose of amino acid | Combination of amino acid residue substitutions | |
|---|---|---|---|
| name | residue substitution | First IgG half-molecule | Second IgG half-molecule |
| Hinge | To form hetero assembly | C226A/C229A | |
| CH2 | To bind to CD16a only when | D265A | P329Y |
| | hetero assembly is formed | | |

| | | |
|---|---|---|
| CH2 | To enhance CD16a binding | S293D/K326T or S239D/S298A/E333A/L242C/K334C |
| | activity | |
| CH3 | To form hetero assembly | K409R |

[0986] Further, antibody composition of the present invention is preferably an antibody composition containing the first IgG half-molecule and the second IgG half-molecule shown in Table 5. In Table 5, each SEQ ID NO denotes the sequence number of the amino acid sequence of the CH domain.

TABLE 5

| | SEQ ID NO of CH | SEQ ID NO of CH |
|---|---|---|
| | of First IgG | of second IgG |
| Antibody | half-molecule | half-molecule |
| composition No. | (amino acid sequence) | (amino acid sequence) |
| 1 | 248 | 252 |
| 2 | 272 | 292 |

[0987] As one aspect of the present invention, the first IgG half-molecule the second IgG half-molecule constituting the above-mentioned antibody composition is exemplified.

[0988] Examples of the first IgG half-molecule the present invention include a first IgG half-molecule characterized by being associated with the second IgG half-molccule because an effector function can be exhibited specifically for a double-positive cell that expresses a desired first antigen and a desired second antigen by being associated with the second IgG half-molecule in the double-positive cell. The first IgG half-molecule of the present invention can be used in combination with the second IgG half-molecule, in the production of an antibody composition including the first IgG half-molecule and the second IgG half-molecule, and in the production of a pharmaceutical composition containing an antibody composition including the first IgG half-molecule and the second IgG half-molecule.

[0989] Further, examples of the second IgG half-molecule of the present invention include a second half-molecule characterized by being associated with the first IgG half-molecule because an effector function can be exhibited specifically for a double -positive cell that expresses a desired first antigen and a desired second antigen by being associated with the first IgG half- molecule in the double positive cell. The second IgG half-molecule of the present invention can be used in combination with the first IgG half-molecule, in the production of an antibody composition including the first IgG half-molecule and the second IgG half-molecule, and in the production of a pharmaceutical composition containing an antibody composition including the first IgG half-molecule and the second IgG half-molecule.

[0990] The first IgG half-molecule or the second IgG half-molecule contained in the antibody composition exemplified above is each an IgG half-molecule having a characteristic of being associated with the corresponding IgG half-molcule, and therefore is included in the first or second IgG half-molecule of the present invention.

[0991] Further, the first or second IgG half-molocule of the present invention may be an IgG half-molecule that specifically binds to any antigen, and the antigen to which the first IgG half-molecule binds and the antigen to which the second IgG half-molecule binds only need to be different from each other.

[0992] The antigen to which the antibody composition of the present invention binds may be any antigen, and preferably, an antigen molecule associated with a cancer, an immune disease, an allergic disease, a cardiovascular disease, or the like is exemplified. Examples thereof include a cytokine, a chemokine, a growth factor, and a receptor therefore, a CD antigen, and the like.

[0993] Examples of the receptor for a cytokine or a growth factor include receptors for interferon (hereinafter referred to as IFN)-α, IFN-β, IFn-γ, interleukin (hereinafter referred to as IL)-2, IL-3, IL-4, IL- 5, IL-6, IL-7, IL-8, IL-9, IL-10, IL-12, IL-13, IL-15, IL-17, IL-18, IL-21, IL-23, IL-27, a granulocyte colony-stimulating factor (G-CSF), a granulocyte/macrophage colony-stimulating factor (GM-CSF), or a macrophage colony-stimulating factor (M-CSF), and the like.

[0994] Examples of the receptor for a chemokine include receptors for SLC, ELC, I-309, TARC, MDC, MIP-3α, or CTACK.

[0995] Examples of the receptor for a growth factor include receptors for epidermal growth factor (EGF), vascular endothelial growth factor (VEGF), angiopoietin, fibroblast growth factor (FGF), hepatocyte growth factor (HGF), platelet-derived growth factor (PDGF), insulin-like growth factor (IGF), erythropoietin (EPO), Trombopoietin (TPO), TGFβ, lephrin, angiopoietin, Frizzled ligand, SDF-1, and the like.

[0996] Examples of the cluster of differentiation (hereinafter referred re as CD) antigens include CD1a, CD1c (BDCA1), CD1d, CD2, CD3, CD4, CD5, CD6, CD7, CD8, CD10, CD11a, CD11b, CD11c, CD14, CD15, CD16, CD18, CD19, CD20, CD21, CD22, CD23, CD24, CD25, CD26 (DPP-4), CD27, CD28, CD30, CD32, CD32a, CD33, CD34, CD37, CD38, CD39, CD40, CD43, CD44, CD45, CD47, CD48, CD49, CD49a, CD49b, CD51, CD52, CD53, CD54, CD55, CD56, CD57, CD59, CD62E, CD62L, CD62P, CD63, CD64, CD66a (CEACAM1), CD66b (NCA95), CD66c (NCA50/90), CD66d (CGM1), CD66e (CEA), CD66f (PSG ), CD68, CD69, CD70, CD71, CD72, CD73, CD74CD75, CD76, CD77, CD78, CD79a, CD79b, CD80 (B7.1), CD81, CD82, CD83, CD84 (SLAMF5) CD85a (ILT-5), CD85b (ILT8), CD85c (LIR8), CD85d (ILT4), CD85f (ILT11), CD85g (ILT7), CD85h (ILT1), CD85i (LIR6a), CD85j (ILT2), CD85k (ILT3), CD85m (ILT10), CD86 (B7.2), CD87, CD89, CD94 (NKG2), CD95 (Fas), CD97, CD98, CD103, CD106, CD107a (LAMP1), CD114 (G-CSFR), CD115 (M-CSFR, CSF1R), CD116 (GM-CSFR), CD117 (SCF-R, C-KIT), CD119 (IFNDR1) CD121a, (IL-1R1), CD122 (IL-2Rb), CD123 (IL-3Ra), CD124 (IL-4Ra), CD125 (IL-5Ra), CD126 (IL-6Ra), CD127 (IL-7Ra), CD134 (OX40), CD135 (FLT3), CD137 (4-1BB), CD38 (Syndecan-1), CD140 (PDGER), CD146 (MUC18), CD147 (EMMRRIN), CD152 (CTLA-4) CD153 (CD30 ligand), CD158a (KIR2DL1), CD158b1 (KIR2DL2), CD158b2 (KIR2DL3), CD158c (KIR2DS6), CD158d (KIR2DL4), CD158e1 (KIR3DL1), CD158e2 (KIR3DS1), CD158f (KIR2DL5), CD158g (KIR2DS5), CD158h (KIR2DS1), CD158i (KIR2DS4), CD158j (KIR2DS2) CD158k (KIR3DL2), CD159a (NKG2A), CD159c (NKG2C), CD161 (NKRP1A), CD162 (PSGL-1), CD163, CD169 (SIGLEC1), CD177, CD178 (FasL), CD183 (CXCR3), CD184 (CXCR4), CD185 (CXCR5), CD191 (CCR1), CD193 (CCR3), CD194 (CCR4), CD195 (CCR5), CD196 (CCR6), CD197 (CCR7), CD198 (CCR8), CD199 (CCR9), CD200 (OX2), CD206 (MMR), CD207 (Langerin), CD209 (DC-SIGN), CD212 (IL-12Rβ1), CD213a1 (IL-13Ra1), CD213a2 (IL-13Ra2), CD215 (IL-15RA), CD217 (IL-17R), CD218a (IL-18Ra), CD218b (IL-18Rβ), CD223 (LAG3), CD226 (DNAM-1), CD229 (SLAMF3), CD252 (OX40L), CD269 (BCMA), CD272 (BTLA), CD274 (PD-L1), CD275 (IOS ligand), CD276 (B7H3), CD278 (ICOS), CD279 (PD-1), CD281 (TLR1), CD282 (TLR2), CD283 (TLR3), CD284 (TLR4), CD286 (TLR6), CD288 (TLR8), CD289 (TLR9), CD294 (CRTH2), CD301 (CLEC10A, MGL), CD302 (DCL1), CD303 (BDCA2), CD304 (BDCA4), CD305, CD314 (NKG2D), CD317 (BST2), CD319 (CS1), CD324 (E-cadherin), CD326 (EpCAM), CD357 (GITR), CD358 (DR6), CD360 (IL-21R), CD365 (TIM-1), CD366 (TIM-3), CD369 (DECTIN-1), CD370 (CLEC9A), CD371 (CLEC12A), human leukocyte antigen (HLA)-Class II (for example, HLA-DR), HIA-1, and the like.

[0997] Further, examples of an antigen involved in pathogenesis of (tumors or an antigen for an antibody, which regulates an immunological function, include ganglioside GM1, GM2, GD2, GD3, Lewis X (C15s), Lewis Y, CD3, CD4, CD40, CD40 ligand, B7 family molecule (for example, CD80, CD86, CD274, B7-DC, B7-H2, B7-H3, B7-H4, B7-H5, B7-H6, or B7-H7), for a B7 family molecule (for example, CD28, CTLA-4, ICOS, PD-1, or BLTA), OX-40, OX-40 ligand, CD137, a tumor necrosis factor (TNF) receptor family molecule (for example, DR3, DR4, DR5, BAFER, LIGHT, TNFR1, or TNFR2), a TNF-related apoptosis-inducing ligand, receptor (TRAIL) family molecule, a receptor family of a TRAIL family molecule (for example, TRAIL-R1, TRAIL-R2, TRAIL-R3, TRAIL-R4), a receptor activator of nuclear factor kappa ligand (RANK), RANK ligand, CD25, a folate receptor, Mesothelin, Siglec-8a cytokine/chemokine receptor [for example, IL-1RII, IL-12Rβ2, IL-17RB, IL-23R, IL27Rα, IL-31R, IL-33Rα, IL 36R, transforming growth factor (TGF)βRII, CCR2, CCR10, CXCR1, CXCR2, a leukotriene B4 receptor (BLT1)], an NK cell receptor (for example, NKG2D, E4BP4, NKp30, NKp44, NKp46, or AhR), a T cell receptor (for example, TCRα/β, TCR Vβ11, TCRδ/δ, TSLPR, SLAM, SLAMF6, LAP,GARP, SR-A1, CD200R, DCR3, or TIGIT), a B cell receptor (for example, BLYS, APRIL, or TSLPR), a dendritic cell receptor (for example, FCER1A, TLR7, CADM1, XCR1, BTLA, SIRPA, DCIR, TROP2, AXL, SIGLEC6, SIGLEC15, CX3CR1, S100A8, S100A9, ASGR1), an amino acid transporter (for example, ASCT2), a serine protease (for example, proteinase-3 or FR3), and the like.

[0998] Examples of a receptor tyrosine kinase include an EGF receptor, an insulin receptor, an IGF-1 receptor, an NGF receptor, a PDGF receptor, an M-CSF receptor, an FGF receptor, a VEGF receptor, an Eph receptor, and the like. Examples of a tyrosine kinase-associated receptor include a cytokine receptor, an Fc receptor, and the like. Further, examples of a cell adhesion molecule include cadherin integrin, and the like. Examples of a G protein-coupled receptor include an adenosine receptor, a cannabinoid receptor, a glucagon receptor, and the like.

[0999] Specific examples of the receptor tyrosine kinase include Epidermal Growth Factor Receptor (EGFR), V-ERB-B2 Avian Erythroblastic Leukemia Viral Oncogene Homolog 2 (HER2), V-ERB-B2 Avian Erythroblastic Leukemia Viral Oncogene Homolog 3 (HER3), V-ERB-B2 Avian Erythroblastic Leukemia Viral Oncogene Homolog 4 (HER4), Insulin Receptor (INSR), Insulin-like Growth Factor 1 Receptor (IGF1R), Nerve Growth Factor Receptor (NGFR), Platelet-derived Growth Factor Receptor, Alpha (PDGFRA), Platelet-derived Growth Factor Receptor, Beta (PDGFRB), Colony-stimulationg Factor Receptor (CSF1R), Colony-stimulationg Factor 2 Receptor Alpha (CSF2RA), Colony-stimulationg Factor 3 Receptor, Granulocyte (CSF3R), Fibroblast Growth Factor Receptor 1 (FGFR1), Fibroblast Growth Factor Receptor 2 (FGFR2), Fibroblast Growth Factor Receptor 3 (FGFR3), Fibroblast Growth Factor Receptor 4 (FGFR4), Kinase Insert Domain Receptor (KDR), Ephrin Receptor EphA1 (EPHA1), Ephrin Receptor EphA2 (EPHA2), Ephrin Receptor EphA3 (EPHA3), and the like.

[1000] Further, examples of the tyrosine kinase-associated receptor include Interleukin-1 Receptor 1 (IL-1R1). Interleukin-1 Receptor Accessory Protein (IL-1RAP), Interleukin-1 Receptor Like 1 (IL-1RL1, ST2), Hepatocyte Growth factor Receptor 1, (c-Met), Macrophage Stimulating 1 Receptor (RON), Platelet-Derived Growth Factor Receptor (PDGFR), Junctional Adhesion Molecule-Like (JAML), Nectin-like protein 5 (Ncel-5), Tumor Necrosis Factor Receptor 1 (TNF-R1), Tumor Necrosis Factor Receptor 2 (TNF-R2), TNF-Related Apoptosis-Inducing Ligand Receptor 1 (TRAIL-R1), TNF-Related Apoptosis-Inducing Ligand Receptor 2 (TRAIL-R2), Death Receptor 3 (DR3), Death Receptor 6 (DR6) Receptor Activator of NF-kB (RANK), Nerve Growth Factor Receptor (NGFR), Lymphotoxin-beta Receptor (LTβR) OX40 (TNFRSF4), Fas (TNFRSF6), 4-1BBL (TNFRSF9), Fn14 (TNFRSF12A), TAC1 (TNFRSF13B), BAFF-R (TNFRSF13C), HVEM (TNFRSF14), BCMA (TNFRSF17), GITR (TNFRSF18), TROY (TNFRSF19), Ectodysplasin A1 Receptor (EDAR), Ectodysplasin A2 Receptor (XEDAR), Receptor Expressed in Lymphoid Tissues (RELT), CD3, CD27, CD30, CD40, FcαRI, FcγRIII and FcεRI, Fc Fragment of IgG, Receptor Transpoter, Alpha (FCGRT), and the like.

[1001] Further, examples of the cell adhesion molecule include Integrin, Alpha 9 (ITGA9), P-selectin Glycoprotein Ligand-1 (PSGL-1), Cadherin-11 (CDH11), Mucosal Vascular Addression Cell Adhesion Molecule 1 (MADCAM1), Alpha 4 (ITGA4) Integrin, Beta 4 (ITGB4), Integrin, Alpha 4 Beta 7, Integin, Alpha 4 Beta 1, and collagen (Type I Collagen), and examples of the G protein-coupled receptor include Adenosine A2A Receptor (ADORA2A), Adenosine A2B Receptor (ADORA2B), Repulsive Guidance Molecule A (RGMA), Glucagon Receptor (GCGR.), Prolactin Receptor (PRLR), Glucagon-like Peptide-1 Receptor (GLPIR), Cannabinoid Receptor 1 (CB1), Mas-related G protein Coupled Recepter-X2 (MRGPRX2), and the like.

[1002] The pharmaceutical composition containing the antibody composition of the present invention is preferably used in a treatment of a disease associated with a cell that expresses the antigen molecule on the surface, and more preferably used in a treatmet of a cancer, an autoimmune disease, or an allergic disease.

[1003] Examples of the cancer include leukemia, lymphoma, multiple myeloma, brain tumor, breast cancer, uterine body cancer, cervical cancer, ovarian cancer, esophageal cancer, gastric cancer, colon cancer, liver cancer, gallbladder cancer, bile duct cancer, pancreatic cancer, adrenal cancer, gastrointestinal stromal tumor, mesothelial tumor, head and neck cancer, kidney cancer, lung, cancer, sarcoma, prostate cancer, testicular tumor, bladder cancer, skin cancer, pediatric cancer, and the like. Further, various cancer treatments by removing suppressive immune cells are also included.

[1004] Examples of the autoimmune disease or allergy include Guillain-Barre syndrome, myasthenia gravis, multiple sclerosis, chronic gastritis, chronic atrophic gastritis, autoimmune hepatitis, primary biliary cholangitis, ulcerative colitis, Crohn's disease, autoimmune pancreatitis, Takayasu's arteritis, Goodpasture's syndrome, rapidly progressive glomerulonephritis, IgA nephropathy, megaloblastic anemia, autoimmune hemolytic anemia, autoimmune neutropenia, idiopathic thrombocytopenic purpura, Basedow's disease, Hashimoto's disease, primary hypothyroidism, idiopathic Addison's disease, type 1 diabetes mellitus, chronic discoid lupus erythematosus, localized scleroderma, pemphigus, pustular psoriasis, psoriasis arthropathica, plaque psoriasis, bullous pemphigoid, herpes gestationis, linear IgA bullous dermatosis, epidermolysis bullosa acquisita, alopecia areata, vitiligo, Harada disease, autoimmune optic neuropathy, autoimmune inner ear disorder, idiopathic azoospermia, habitual abortion, rheumatoid arthritis, systemic lupus erythematosus, antiphospholipid antibody syndrome, polymyosins, dermatomyosins, seleroderma, Sjogren's syndrome, an IgG4-related disease, vasculitic syndrome, mixed connective tissue disease, autoimmune hemolytic anemia, incompatible transfusion, idiopathic thrombacytopenic purpura, atopic dermatitis, polyarteritis, allergic rhinitis (pollinosis), allergic conjunctivitis, allergic gastroenteritis, bronchial asthma, childhood asthma, a food allergy, a drug allergy, urticaria, anaphylactic shock, transplantation rejection, contact dermatitis, Behcet's disease, and the like.

[1005] Examples of a specific combination of the first antigen and the second antigen to which the antibody composition of the present invention binds, the target cell, and the disease to be treated with a pharmaceutical composition containing the antibody composition are shown below. Further, with respect to such examples, correspondence relationships are shown in Tables 6A to 6E.

[1006] c1) An antibody composition for which the first antigen is CADM1, the second antigen is CCR4, and the target cell is an ATL (adult T-cell leukemia-lymphoma) cell.

[1007] As the disease to be treated with a pharmaceutical composition containing the antibody composition, ATL is exemplified.

[1008] c2) An antibody composition for which the first antigen is EGFR, the second antigen is HER 2, and the target cell is a cancer cell.

[1009] As the pharmaceutical composition containing the antibody composition, a solid cancer such as gastric cancer or breast cancer is exemplified.

[1010] c3) An antibody composition for which the first antigen is CD52, the second antigen is CD70, and the target cell is an activated T cell, an activated B cell, or activated APC.

[1011] c4) An antibody composition for which the first antigen is CD2, the second antigen is CD 70, and the target cell is an activated T cell.

[1012] c5) An antibody composition for which the first antigen is CD19the second antigen is CD70, and the target cell is an activated B cell.

[1013] c6) An antibody composition for which the first antigen is CD2, the second antigen is CD40 ligand, and the target cell is an activated effector cell T activated Teff).

[1014] As the disease to be treated with a pharmaceutical composition containing the antibody composition, Sjogren's syndrome is exemplified.

[1015] c7) antibody composition for which the first antigen is PD-L1, the second antigen is one selected from CD19, CD30, CCR4, CD20, CD22, and CD79b, and the target cell is lymphoma.

[1016] As the disease to be treated with a pharmaceutical composition containing the antibody composition, lymphoma is exemplified.

[1017] e8) An antibody composition for which the first antigen is PD-L1, the second antigen is one selected from CD19, CD30, CCR4, CD20, CD22, and CD79b, and the target cell is leukemia.

[1018] As the disease to be treated with a pharmaceutical composition containing the antibody composition, leukemia is exemplified.

[1019] c9) An antibody composition for which the first anti ens CD8, the second antigen is CCR4, and the target cell is a regulatory T cell (Treg).

[1020] As the disease to be treated with a pharmaceutical composition containing the antibody composition, a cancer is exemplified. The pharmaceutical composition is preferably used for cancer immunotherapy.

[1021] c10) An antibody composition for which the first antigen is CTLA-4, the second antigen is one selected from CD4, CCR4, and GITR, and the target cell is a regulatory T cell (Treg).

[1022] As the disease to be treated with a pharmaceutical composition containing the antibody composition, a cancer is exemplified. The pharmaceutical composition is preferably used for cancer immunotherapy.

[1023] e11) An antibody composition for which the first antigen is TIGIT, the second antigen is one selected from CD4, CCR4, and GITR, and the target is a regulatory T cell (Treg).

[1024] As the disease to be treated with a pharmaceutical composition containing the antibody composition, a cancer is exemplified. The pharmaceutical composition is preferably used for cancer immunotherapy.

[1025] c12) An antibody composition for which the first antigen is PD-1, the second antigen is one selected from CD4, CCR4, and GITR, and the target cell is a regulatory T cell (Treg).

[1026] As the disease to be treated with a pharmaceutical composition containing the antibody composition, a cancer is exemplified. The pharmaceutical composition is preferably used for cancer immunotherapy.

[1027] c13) An antibody composition for which the first antigen is OX40, the second antigen is one selected from CD127 CD26, CD70, and CD15s and the target cell is an effector T cell (Teff).

[1028] As the disease to be treated with a pharmaceutical composition containing the antibody composition, an autoimmune disease is exemplified.

[1029] c14) An antibody composition for which the first antigen is 4-1BB, the second antigen is one selected from CD127, CD26, CD70, and CD15s, and the target cell is an effector T cell (Teff).

[1030] As the disease to be treated with a pharmaceutical composition containing the antibody composition, an autoimmune disease is exemplified.

[1031] e15) An antibody composition for which the first antigen is GITR the second antigen is one selected from CD127, CD26, CD70, and CD15a, and the target cell is an effector T cell (Teff).

[1032] As the disease to be treated with a pharmaceutical composition containing the antibody composition, an autoimmune disease is exemplified.

[1033] c16) An antibody composition for which the first antigen is CD40 ligand, the second antigen is one selected from CD127, CD26, CD70, and CD15s, and the target cell is an effector T cell (Teff).

[1034] As the disease to be treated with a pharmaceutical composition containing the antibody composition, an autoimmune disease is exemplified.

[1035] e17) An antibody composition for which the first antigen is CD4, the second antigen is CD69, and the target cell is a tissue-resident memory T (TRM), cell.

[1036] As the disease to be treated with a pharmaceutical composition containing the antibody composition, ANCA (anti-neutrophil cytoplasmic antibody)-associated glomerulonephritis is exemplified.

[1037] c18) An antibody composition for which the first antigen is PD-1, the second antigen is CD3, and the target cell is at least one of a peripheral helper T (TPH) cell and a PD-1^{high} CD8-positive T cell.

[1038] As the disease to be treated with a pharmaceutical composition containing the antibody composition, rheumatoid arthritis is exemplified.

[1039] c19) An antibody composition for which the first antigen is PD-1, the second antigen is CD4, and the target cell is a PD-1-positive T cell.

[1040] As the disease to be treated with a pharmaceutical composition containing the antibody composition, celiac disease is exemplified.

[1041] c20) An antibody composition for which the first antigen is integrin α4β7 and the second antigen is one selected from CCR6, CXCR3, and CD161, and the target cell is at least one selected from an effector T cell (Teff) and an innate lymphoid cell (ILC).

[1042] As the disease to be treated with a pharmaceutical composition containing the antibody composition, an inflammatory bowel disease is exemplified.

[1043] c21) An antibody composition for which the first antigen is integrin α4β7 and the second antigen is CD127, and the target cell is a infiltrating the intestinal tract other than all innate lymphoid cells (ILC) and Treg.

[1044] As the disease to be treated with a pharmaceutical composition containing the antibody composition, an inflammatory bowel disease is exemplified.

[1045] c22) antibody composition for which the first antigen is intern in α4β7 and the second antigen is CD40 ligand, and the target cell is a local migratory activated T cell.

[1046] As the disease to be treated with a pharmaceutical composition containing the antibody composition, at least one of multiple sclerosis and an inflammatory bowel disease is exemplified.

[1047] c23) An antibody composition for which the first antigen is integrin α4β1 and the second antigen is CD40 ligand, and the target cell is a local migratory activated T cell.

[1048] As the disease to be treated with a pharmaceutical composition containing the antibody composition, at least one of multiple sclerosis and an inflammatory bowel disease is exemplified.

[1049] e24) An antibody composition for which the first antigen is CXCR5 and the second antigen is CD127, and the target cell is an innate lymphoid cell (ILC).

[1050] As the disease to be treated with a pharmaceutical composition containing the antibody composition, an allergic disease is exemplified.

[1051] c25) An antibody composition for which the first antigen is a TPO receptor (c-mpl) and the second antigen is CD34, and the target cell is an abnormally proliferating hematopoietic stem cell.

[1052] As the disease to he treated with a pharmaceutical composition containing the antibody composition, primary myelofibrosis is exemplified.

[1053] c26) An antibody composition for which the first antigen is a TPO receptor (c-mpl) and the second antigen is CD123, and the target cell is a CD123-positive leukemic stem cell.

[1054] As the disease to be treated with a pharmaceutical composition containing the antibody composition, primary myelofibrosis exemplified.

[1055] c27) An antibody composition for which the first antigen CXCR3 and the second antigen is CD3, and the target cell is a CX3CR1-positive cell (a cytotoxic effector T-cell or the like, excluding NK cells).

[1056] As the disease to be treated with a pharmaceutical composition containing the antibody composition, at least one selected from an autoimmune disease (for example, Crohn's disease or the like), arteriosclerosis, and an ischemic heart disease is exemplified.

[1057] e28) An antibody composition for which the first antigen is CXCR1 and the second antigen is CD127 L or CD40 ligand, and the target cell is a Th1 cell.

[1058] As the disease to be treated with a pharmaceutical composition containing the antibody composition, systemic lupus erythematosus is exemplified.

[1059] c29) An antibody composition for which the first antigen is CCR4 and the second antigen is CD127 of CD4 ligand, and the target cell is a CCR4-positive T cell other than Treg.

[1060] As the disease to be treated with a pharmaceutical composition containing the antibody composition, an allergic disease is exemplified.

[1061] c30) An antibody composition for which the first antigen is CCR6 and the second antigen is CD127 CD40 ligand, and the target cell is a Th17 cell.

[1062] As the disease to be treated with a pharmaceutical composition containing the antibody composition, psoriasis is exemplified.

[1063] c31) An antibody composition for which the first antigen is CRTH2 and the second antigen is CD127 or CD40 ligand, and the target cell is a Th2 cell.

[1064] As the disease to be treated with a pharmaceutical composition containing the antibody composition, an allergic disease is exemplified.

[1065] c32) An antibody composition for which the first antigen is CRTH2 and the second antigen is CCR4, and the target cell is a Th2 cell.

[1066] As the disease to be treated with a pharmaceutical composition containing the antibody composition, at least one selected from asthma, eosinophilic sinusitis, and atopic dermatitis is exemplified.

[1067] c33) An antibody composition for which the first antigen is CRTH2 and the second antigen is ST2, and the target cell is a Tpath2 cell.

[1068] As the disease to he treated with a pharmaceutical composition containing the antibody composition, at least one of asthma and eosinophilic sinusitis is exemplified.

[1069] c34) An antibody composition for which the first antigen is CRTH2 and the second antigen is CCR6, and the target cell is a Th2/Th17 cell (a heterozygous cell that appears only in severe asthma).

[1070] As the disease to be treated with a pharmaceutical composition containing the antibody composition, an allergic disease is exemplified.

[1071] c35) An antibody composition for which the first antigen is CRTH2 and the second antigen is CCR3, and the target cell is an eosinophil, basophil, or a Th2 cell.

[1072] As the disease to be treated with a pharmaceutical composition containing the antibody composition, an allergic disease is exemplified.

[1073] c36) An antibody composition for which the first antigen is CD207 and the second antigen is CD11b or CD1a, and the target cell is a Langerhans cell precursor cell.

[1074] As the disease to be treated with a pharmaceutical composition containing the antibody composition, Langerhans cell histiocytosis (LCH) is exemplified.

[1075] c37) An antibody composition for which the first antigen is CD123 and the second antigen is HLA-DR, and the target cell is a plasmacytoid dendritic cell.

[1076] As the disease to be treated with a pharmaceutical composition containing the antibody composition, systemic lupus erythematosus is exemplified.

[1077] c38) An antibody composition for which the first antigen is CD123 and the second antigen is ASCT2, and the target cell is at least one selected from a plasmacytoid dendritic cell, a Th1 cell, and a Th17 cell.

[1078] As the disease to be treated with a pharmaceutical composition containing the antibody composition, systemic lupus erythematosus is exemplified.

[1079] e39) An antibody composition for which the first antigen is CSF1R and the second antigen is CD14, and the target cell is a monocytic myeoid-derived suppressor cell.

[1080] As the disease to be treated with a pharmaceutical composition containing the antibody composition, idiopathic pulmonary fibrosis is exemplified.

[1081] c40) An antibody composition for which the first antigen is CSF1R and the second antigen is CD33, and the target cell is a myeloid-derived suppressor cell.

[1082] As the disease to be treated with a pharmaceutical composition containing the antibody composition, a cancer is exemplified.

[1083] c41) An antibody composition for which the first antigen is CD19 and the second antigen is CD38, and the target cell is a plasma cell.

[1084] As the disease to be treated with a pharmaceutical composition containing the antibody composition, systemic lupus erythematosus is exemplified.

[1085] c42) An antibody composition for which the first antigen is CD3 and the second antigen is IL-23R, and the target cell is at least one selected from a Th1 cell, a Th17 cell, and a Tfh cell.

[1086] As the disease to be treated with a pharmaceutical composition containing the antibody composition, systemic lupus erythematosus is exemplified.

[1087] c43) An antibody composition for which the first antigen is CD3 and the second antigen is CX3CR1, and the target cell is a CX3CR1-positive cell (for example, a cytotoxic effector T-cell or the like, excluding NK cells).

[1088] As the disease to be treated with a pharmaceutical composition containing the antibody composition, at least one selected from an autoimmune disease (for example, Crane disease or the like), arteriosclerosis and an ischemic heart disease is exemplified.

[1089] c44) An antibody composition for which the first antigen is CXCR4 and the second antigen is type 1 collagen, and the target cell is a fiber cell.

[1090] As the disease to be treated with a pharmaceutical composition containing the antibody composition, at least one selected from various fibrotic diseases such as idiopathic pulmonary fibrosis, systemic sclerosis, and hepatic cirrhosis is exemplified.

[1091] c45) An antibody composition for which the first antigen CXCR4 and the second antigen is CD14, and the target cell is at least one of a monocyte and a fiber cell.

[1092] As the disease to be treated with a pharmaceutical composition containing the antibody composition, idiopathic pulmonary fibrosis is exemplified.

[1093] c46) An antibody composition for which the first antigen ts CXCR4 and the second antigen is CD16, and the target cell is an activated nentrophil.

[1094] As the disease to be treated with a pharmaceutical composition containing the antibody composition, at least one selected from neutrophilic asthma, chronic obstructive pulmonary disease, and Alzheimer's disease is exemplified.

[1095] e47) An antibody composition for which the first antigen is CLEC10A and the second antigen is CD14 or CD 16, and the target cell is an intermediate monocyte.

[1096] As the disease to be treated with a pharmaceutical composition containing the antibody composition, at least one selected from Crohn's disease, rheumatoid arthritis, and asthma is exemplified.

[1097] c48) An antibody composition for which the first antigen is CD70 and the second antigen is CD38, and the target cell is at least one of an activated T cell and an activated B cell.

[1098] As the disease to he treated with a pharmaceutical composition containing the antibody composition, at least one of multiple sclerosis and neuromyelitis optica is exemplified.

[1099] e49) An antibody composition for which the first antigen is CD70 and the second antigen is one selected from CD4, CD127, and TIM-1, and the target cell is at least one selected from a Th1 cell, a Th17 cell, and a plasmacytoid dendritic cell.

[1100] As the disease to be treated with a pharmaceutical composition containing the antibody composition, systemic lupus erythematosus is exemplified.

[1101] e50) An antibody composition for which the first antigen is CD4 and the second antigen is TIM-1 and the target cell is at least one selected from a Th1 cell, a Th17 cell, and a plasmacytoid dendritic cell.

[1102] As the disease to be treated with a pharmaceutical composition containing the antibody composition, systemic lupus erythematosus is exemplified.

[1103] c51) An antibody composition for which the first antigen is CD70 and the second antigen is CD52, and the target cell is at least one of an activated T cell and an activated B cell.

[1104] As the disease to ho treated with a pharmaceutical composition containing the antibody composition, multiple sclerosis is exemplified.

[1105] c52) An antibody composition for which the first antigen is CB1 and the second antigen is AT1R, and the target cell is a GPCR heteromer expressing bad astrocyte.

[1106] As the disease to be treated with a pharmaceutical composition containing the antibody composition, hepatic cirrhosis is exemplified.

[1107] c53) An antibody composition for which the first antigen is CD4 or PD-1 and the second antigen is CD153, and the target cell is a senescent T cell.

[1108] As the disease to be treated with a pharmaceutical composition containing the antibody composition, systemic lupus erythematosus exemplified.

[1109] c54) An antibody composition for which the first antigen is FCεRI and the second antigen is CD34 or C-KIT, and the target cell is at least one of a mast cell and a mast cell precursor cell.

[1110] As the disease to be treated with a pharmaceutical composition containing the antibody composition, a mast cell activation syndrome (MCAS) including at least one selected from urticaria, a food allergy, and mastocytosis is exemplified,

[1111] c55) An antibody composition for which the first antigen is CD34 and the second antigen is CD203 or MRGPRX2, and the target cell is a mast cell precursor cell.

[1112] As the disease to be treated with a pharmaceutical composition containing the antibody composition, a mast cell activation syndrome (MCAS) including at least one selected from urticaria, a food allergy, and mastocytosis is exemplified.

[1113] c56) An antibody composition for which the first antigen is CD52 and the second .antigen rs CD127, and the target cell is at least one of a T cell other than Treg and a B cell.

[1114] As the disease to be treated with a pharmaceutical composition containing the antibody composition, multiple sclerosis is exemplified.

[1115] c57) An antibody composition for which the first antigen is CD69 and the second antigen is CD21, and the target cell is an activated mature naive B cell.

[1116] As the disease to he treated with a pharmaceutical composition containing the antibody composition, at least one selected from multiple sclerosis, type I diabetes mellitus, and rheumatoid arthritis is exemplified.

[1117] c58) An antibody composition for which the first antigen is CD106 and the second antigen is one selected from CD11c, CD19, CD21, and CD72, end the target cell is a follicular dendritic cell.

[1118] As the disease to be treated with a pharmaceutical composition containing the antibody composition, at least one selected from secondary progressive multiple sclerosis (SPMS), rheumatoid arthritis for which anti-TNF therapy is not effective, transplantation, and systemic lupus erythematosus is exemplified.

[1119] c59) An antibody composition for which the first antigen is 4-1BB and the second antigen is one selected from CD11c, CD19, CD21, and CD72, and the target cell is a follicular dendritic cell.

[1120] As the disease to be treated with a pharmaceutical composition containing the antibody composition, at least one selected from secondary progressive multiple sclerosis (SPMS), rheumatoid arthritis for which anti-TNF therapy is not effective, transplantation, and systemic lupus erythematosus is exemplified.

[1121] c60) An antibody composition for which the first antigen is BLT1 and the second antigen is CD49b, and the target cell is a BLT-positive CD8-positive cell.

[1122] As the disease to be treated with a pharmaceutical composition containing the antibody composition, asthma is exemplified.

[1123] c61) An antibody composition for winch the first antigen is CD226 and the second antigen is CD8, and the target cell is a CD226-positive CD8-positive effector memory cell.

[1124] As the disease to be treated with a pharmaceutical composition containing the antibody composition, systemic scleroderma is exemplified.

[1125] c62) An antibody composition for which the first antigen is CXCR3 and the second antigen is one selected from CD8, CD49a, IL-15R, and NKG2D, and the target cell is an effector memory CD8-positive cell.

[1126] As the disease to be treated with a pharmaceutical composition containing the antibody composition, at least one of vitiligo and psoriasis is exemplified.

[1127] c63) An antibody composition for which the first antigen is CD 49a and the second antigen is one selected front CD8, IL-15R, and NKG2D, and the target cell is an effector memory CD8-positive cell.

[1128] As the disease to be treated with a pharmaceutical composition containing the antibody composition, at least one of vitiligo and psoriasis is exemplified.

[1129] c64) An antibody composition for which the first antigen is IL-15R and the second antigen is CD8 or NKG2D, and the target cell is an effector memory CD8-positive cell.

[1130] As the disease to be treated with a pharmaceutical composition containing the antibody composition, at least one of vitiligo and psoriasis is exemplified.

[1131] c65) An antibody composition for which the first antigen is NKG2D and the second antigen is CD8, and the target cell is an effector memory CD8 -positive cell.

[1132] As the disease to be treated with a pharmaceutical composition containing the antibody composition, at least one of vitiligo and psoriasis is exemplified.

[1133] c66) An antibody composition for which the first antigen is CD177 and the second antigen is PR3, and the target cell is at least one of a neutrophil infiltrating outside the blood vessel and a PR3-presenting neutrophil.

[1134] As the disease to be treated with a pharmaceutical composition containing the antibody composition, at least one of ANCA (antineutrophil cytoplasmic antibody associated vasculitis and systemic lupus erythematosus is exemplified,

[1135] c67) An antibody composition for which the first antigen is CD4 and the second antigen is CD127, and the target cell is a CD4-positive cell other than Treg.

[1136] As the disease to be treated with a pharmaceutical composition containing the antibody composition, a T cell-dependent immune-related disease is exemplified.

[1137] c68) An antibody composition for which the first antigen is CD40 ligand and the second antigen is IL-6, and the target cell is an activated T cell.

[1138] As the disease to be treated with a pharmaceutical composition containing the antibody composition, an immune-related disease is exemplified.

[1139] c69) An antibody composition for which the first antigen is IL-17 and the second antigen is membrane-associated TNF, and the target cell is an IL-17R and membrane-associated TNF-expressing cell.

[1140] As the disease to be treated with a pharmaceutical composition containing the antibody composition, psoriatic arthritis is exemplified.

[1141] e70) An antibody composition for which the first antigen is IL-23R and the second antigen is CCR6, and the target cell is a Th17 cell.

[1142] As the disease to be treated with a pharmaceutical composition containing the antibody composition, an automimune disease including at least one of Sjogren's syndrome and psoriasis is exemplified.

[1143] c71) An antibody composition for which the first antigen is CD64 and the second antigen is one selected from CD206, CD163, and CD68, and the target cell is an M2 macrophage.

[1144] As the disease to be treated with a pharmaceutical composition containing the antibody composition, a cancer is exemplified.

[1145] c72) An antibody composition for which the first antigen is CD163 and the second antigen is CD206 or CD68, and the target cell is an M2 macrophage.

[1146] As the disease to be treated with a pharmaceutical composition containing the antibody composition, a cancer is exemplified.

[1147] c73) An antibody composition for which the first antigen is CD206 and the second antigen is CD68, and the target cell is an M2. macrophage.

[1148] As the disease to be treated with a pharmaceutical composition containing the antibody composition, a cancer is exemplified.

[1149] c74) An antibody composition for which the first antigen is CD14 and the second antigen is one selected from CD48. CD84, CD97, and CD 305, and the target cell is a myeloid-derived suppressor cell.

[1150] As the disease to be treated with a pharmaceutical composition containing the antibody composition, a cancer is exemplified.

[1151] c75) An antibody composition for which the first an is CD15 and the second antigen is one selected from CD48, CD84, CD97, and CD305 and the target cell is a myeloid-derived suppressor cell.

[1152] As the disease to he treated with a pharmaceutical composition containing the antibody composition, a cancer is exemplified.

[1153] c76) An antibody composition for which the first antigen is CD33 and the second antigen is one selected from CD48, CD84, CD97, and CD305, and the target cell is a myeloid-derived suppressor cell.

[1154] As the disease to be treated with a pharmaceutical composition containing the antibody composition, a cancer is exemplified.

[1155] c77) An antibody composition for which the first antigen is CD11b and the second antigen is one selected from CD48, CD84, CD97, and CD305, and the target cell is a myeloid-derived suppressor cell.

[1156] As the, disease to be treated with a pharmaceutical composition containing the antibody composition, a cancer is exemplified.

[1157] c78) An antibody composition for which the first antigen is CCR4 and the second antigen is one selected from CADM1, CD30, and CD70, and the target cell is a tumor cell.

[1158] As the disease to be treated with a pharmaceutical composition containing the antibody composition, at least one of leukemia and lymphoma is exemplified.

[1159] c79) An antibody composition for which the first antigen is CD38 and the second antigen is CD138 or BCMA, and the target cell is a tumor cell.

[1160] As the disease to be treated with a pharmaceutical composition containing the antibody composition, at least one of leukemia and Lymphoma is exemplified.

[1161] c80) An antibody composition for which the first antigen is BCMA and the second antigen is CD56 or CS1, and the target cell is a tumor cell.

[1162] As the disease to be treated with a pharmaceutical composition containing the antibody composition, at least one of leukemia and lymphoma is exemplified.

[1163] c81) An antibody composition for which the first antigen is CD40 ligand and the second antigen is one selected from CD36, CD62P, and CD63, and the target cell is an abnormal megakaryocyte.

[1164] As the disease to be treated with a pharmaceutical composition containing the antibody composition, at least one of leukemia and lymphoma is exemplified.

[1165] c82) An antibody composition for which the first antigen is TIM-3 and the second antigen is one selected from CD123, CD33, CD47, CD70, and CLEC12A, and the target cell is a tumor cell.

[1166] As the disease to be treated with a pharmaceutical composition containing the antibody composition, at least one a leukemia and lymphoma is exemplified.

[1167] c83) An antibody composition for which the first antigen is CD123 and the second antigen is one selected from CD33, CD47, CD 70, and CLEC12A, and the target cell is a tumor cell.

[1168] As the disease to be treated with a pharmaceutical composition containing the antibody composition, at least one of leukemia and lymphoma is exemplified.

[1169] An antibody composition for which the first antigen is CD5 and the second antigen is CD23, and the target cell is a tumor cell.

[1170] As the disease to be treated with a pharmaceutical composition containing the antibody composition at least one of leukemia and lymphoma is exemplified.

[1171] c85) An antibody composition for which the first antigen is CD10 or CD5 and the second antigen is CD20, and the target cell is a tumor cell.

[1172] As the disease to be treated with a pharmaceutical composition containing the antibody composition, at least one of leukemia and lymphoma is exemplified.

[1173] c86) An antibody composition for which the first antigen CD40 and the second antigen one selected from CD80, CD86, ICOS ligand, 4-1BB ligand, OX40 ligand, CD70, GITR, PD-L1, PD-L2, B7DC, B7H3, B7H4, B7H5, B7H6, and B7H7, and the target cell is an activated antigen-presenting cell.

[1174] As the disease to be treated with a pharmaceutical composition containing the antibody composition, an inflammatory disease is exemplified.

[1175] c87) An antibody composition for which the first antigen is PTPRS and the second antigen is IL-21R, and the target cell is at least one selected from a plasmacytoid dendritic cell (pDC), a T cell, and a B cell.

[1176] As the disease to be treated with a pharmaceutical composition containing the antibody composition, an autoimmune disease is exemplified.

[1177] c88) An antibody composition for which the first antigen is PTPRS and the second antigen is CD38, and the target cell is at least one selected from a plasmacytoid dendritic cell (pDC), an activated T cell, a B cell, and a plasma cell.

[1178] As the disease to be treated with a pharmaceutical composition containing the antibody composition, an autoimmune disease is exemplified.

[1179] c89) An antibody composition for which the first antigen is PTPRS and the second antigen is CD32a, and the target cell is at least one of a plasmacytoid dendritic cell (pDC) and a myeloid cell.

[1180] As the disease to be treated with a pharmaceutical composition containing the antibody composition, an autoimmune disease is exemplified.

[1181] c90) An antibody composition for which the first antigen is OX40 and the second antigen is CD127 or CD40 ligand, and the target cell is a helper T cell other than Treg.

[1182] As the disease to be treated with a pharmaceutical composition containing the antibody composition, an allergic disease is exemplified.

[1183] c91) An antibody composition for which the first antigen is OX40 and the second antigen is CD8 NKG2D, and the target cell is a CD8 memory T cell.

[1184] As the disease to be treated with a pharmaceutical composition containing the antibody composition, at least one of vitiligo and psoriasis is exemplified.

[1185] c92) An antibody composition for which the first antigen is OX40 and the second antigen is CD226, and the target tell is a CD8 mammy T cell.

[1186] As the disease to be treated with a pharmaceutical composition containing the antibody composition, scleroderma is exemplified.

[1187] c93) An antibody composition for which the first antigen OX40 and the second antigen is CRTH2, and the target cell is an activated Tb2 cell.

[1188] As the disease to be treated with a pharmaceutical composition containing the antibody composition, an allergic disease is exemplified.

[1189] c94) An antibody composition for which the first antigen is CRTH2 and the second antigen is CD2, and the target cell is at least one of a and an innate lymphoid cell (ILC2 cell).

[1190] As the disease to be treated with a pharmaceutical composition containing the antibody composition, an allergic disease is exemplified.

[1191] c95) An antibody composition for which the first antigen is CRTH2 and the second antigen is CD7, and the target cell is at least one of a Th2 cell and an innate lymphoid cell (ILC2 cell).

[1192] As the disease to be treated with a pharmaceutical composition containing the antibody composition, an allergic disease is exemplified.

[1193] c96) An antibody composition for which the first antigen is CRTH2 and the second antigen is CD45, and the target cell is a CRTH2-positive blood cell.

[1194] As the disease to be treated with a pharmaceutical composition containing the antibody composition, an allergic disease is exemplified.

TABLE 6A

| First | Second | | |
|---|---|---|---|
| antigen | antigen | Disease to be treated | Target cell |
| CADM1 | CCR4 | adult T-cell leukemia | adult T-cell leukemia |
| | | | (ATL) cell |
| EGFR | HERs | solid cancer such as | cancer cell |
| | | gastric cancer or | |
| | | breast cancer | |
| CD52 | CD70 | — | activaed T cell, |
| | | | activated B cell, |
| | | | or activated APC |
| CD2 | CD70 | — | activated T cell |
| CD19 | CD70 | — | activated B cell |
| CD2 | CD40 | Sjogren's syndrome | activated effector T |
| | ligand | | cell (activated Teff) |
| PD-L1 | CD19 | lymphoma or | lymphoma or |
| | CD30 | leukemia | leukemia cell |
| | CCR4 | | |
| | CD20 | | |
| | CD22 | | |
| | CD79b | | |
| CD8 | CCR4 | cancer (cancer | regulatory T cell |
| CTLA-4 | CD4 | immunotherapy) | (Treg) |
| | CCR4 | | |
| | GITR | | |
| TIGIT | CD4 | | |
| | CCR4 | | |
| | GITR | | |
| PD-1 | CD4 | | |
| | CCR4 | | |
| | GITR | | |
| OX4- | CD127 | autoimmune disease | effector T cell |
| | CD26 | | (Teff) |
| | CD70 | | |
| | CD15 [symbol] | | |
| 4-1BB | CD127 | | |
| | CD26 | | |
| | CD70 | | |
| | CD15 [symbol] | | |
| GITR | CD127 | | |
| | CD26 | | |
| | CD70 | | |
| | CD15 [symbol] | | |
| CD40 | CD127 | | |
| ligand | CD26 | | |
| | CD70 | | |
| | CD15 [symbol] | | |
| CD4 | CD69 | ANCA-associated | tissue-resident |
| | | glomerulonephritis | memory T |
| | | | (TRM) cell |

[symbol]

indicates data missing or illegible when filed

TABLE 6B

| First antigen | Second antigen | Disease to be treated | Target cell |
|---|---|---|---|
| PD-1 | CD3 | rheumatoid arthritis | peripheral helper T (TPH) cell and |
| | CD4 | celiac disease | PD-1high CD8-positive T cell |
| Integrin α4β7 | CCR6 | inflammatory bowel disease | effector T cell (Teff) and innate lymphold cell (ILC) |
| | CXCR3 | | |
| | CD161 | | |
| | CD127 | Inflammatory bowel disase | T cell infiltrating intestinal track other than all |
| | | | innate lymphoid cells (ILC) and Treg |
| | CD40 ligand | multiple sclerosis or | local migratory activated T cell |
| | | inflammatory bowel disease | |
| integrin α4β1 | CD40 ligand | multiple sclerosis or | local migratory activated T cell |
| | | inflammatory bowel disease | |
| CXCR5 | CD127 | allergic disease | innate lymphoid cell (ILC) |
| TPO receptor | CD34 | primary myelofibrosis | abnormally proliferating hematopoletic stem cell |
| (c-mpl) | CD123 | | CD123-positive leukemic stem cell |
| CXCR3 | CD3 | autoimmune disease | CX3CR1-positive cell (cytotoxic effector T-cell or |
| | | (Crohn's disease or the like), | the like, excluding NK cells) |
| | | areriosclerosis, or ischemic | |
| | | heart disease | |
| | CD127 | systemic lupus erythematosus | Th1 cell |
| | CD40 ligand | | |
| CCR4 | CD127 | allergic disease | CCR4-positive T cell other than Treg |
| | CD40 ligand | | |
| CCR6 | CD127 | psoriasis | Th17 cell |
| | CD40 ligand | | |
| CRTH2 | CD127 | allergic disease | Th2 cell |
| | CD40 ligand | | |
| | CCR4 | asthma, eosinophilic sinusitis, | |
| | | or atopic dermatisis | |
| | ST2 | asthma and eosinophilic | Tpath2 cell |
| | | sinusitis | |
| | CCR6 | allergic disease | Th2/Th17 cell (heterozygous cell that appears |
| | | | only in severe asthma) |
| | CCR3 | | eosinophil, basophil, or Th2 cell |
| CD207 | CD11b | Langerhans cell histiocytosis | Langerhans cell precursor cell |
| | CD1a | (LCH) | |
| CD123 | HLA-DR | systemic lupus erythematosus | plasmacytoid dendritic cell |
| | ASCT2 | | plasmacytoid dendritic cell, Th1 cell, and Th 17 cell |
| CSF1R | CD14 | Idiopathic pulmonary fibrosis | monocyclic myeloid-derived supressor cell |
| | CD33 | cancer | myeloid-dervided suppressor cell |
| CD19 | CD38 | systemic lupus erythematosus | plasma cell |
| CD3 | IL-23R | systemic lupus erythematosus | Th1 cell, Th17 cell, or Tlh cell |
| | CD3CR1 | autoimmune disease | CX3CR1-positive cell (cytotoxic effector T-cell |
| | | (Crohn's disease or the like), | or the like, excluding NK cells) |
| | | arteriosclerosis, or ischemic | |
| | | heart disease | |
| CXCR4 | type 1 collagen | various fibrotic diseases such | fiber cell |
| | | as idiopathic pulmonary | |
| | | fibrosis, systemic sclerosis, | |
| | | and hepatic cirrhosis | |
| | CD14 | idiopathic pulmonary fibrosis | monocyte and fiber cell |
| | CD16 | neutrophilic asthma, chronic | activated neutrophil |
| | | obstructive pulmonary | |
| | | disease, or Alzehimer's | |
| | | disease | |
| CLEC10A | CD14 | Crohn's disease, rheumatoid | intermediate monocyte |
| | CD16 | arthritis, or asthma | |
| CD70 | CD38 | multiple sclerosis or | activated T cell and activated B cell |
| | | neuromyelitis optica | |
| | CD4 | systemic lupus erythematosus | Th1 cell, Th17 cell, and plasmacyloid dendritic cell |
| | CD127 | | |
| | TIM-1 | | |
| CD4 | TIM-1 | | |
| CD70 | CD62 | multiple sclerosis | activated T cell and activated B cell |

TABLE 6C

| First | Second | | |
|---|---|---|---|
| antigen | antigen | Disease to be treated | Target cell |
| CB1 | AT1R | hepatic cirrhosis | GPCR heteromer expressing bad |
| | | | astrocyte |
| CD4 | CD153 | systemic lupus | senescent T cell |
| PD-1 | | erythematosus | |
| FCεRI | CD34 | mast cell activaiton | mast cell and mast cell precursor cell |
| | C-KIT | syndrome (MCAS) | |
| | | such as urticaria, food | |
| | | allergy, and mast-cell | |
| | | disease | |
| CD34 | CD203 | mast cell activaiton | mast cell precursor cell |
| | MRGPRX2 | syndrome (MCAS) | |
| | | such as urticaria, food | |
| | | allergy, and mast-cell | |
| | | disease | |
| CD52 | CD127 | multiple sclerosis | T cell other than Treg and B cell |
| CD69 | CD21 | multiple sclerosis, | activated mature naive B cell |
| | | type 1 diabetes mellitus, | |
| | | and rheumatoid arthritis | |
| CD106 | CD11c | secondary progressive | follicular dendritic cell |
| | CD19 | multiple sclerosis (SPMS), | |
| | CD21 | rheumatoid arthritis for | |
| | CD72 | which anti-TNF therapy is | |
| 4-1BB | CD11c | not effective, transplantation, | |
| | CD19 | or systemic lupus | |
| | CD21 | erythematosus | |
| | CD72 | | |
| BLT1 | CD49b | asthma | BLT1-positive CD8-positive cell |
| CD226 | CD8 | systemic scleroderma | CD226-positive CD8-positive effector |
| | | | memory cell |
| CXCR3 | CD8 | vitiligo or psoriasis | effector memory CD8-positive cell |
| | CD49a | | |
| | IL-15R | | |
| | NKG2D | | |
| CD49a | CD8 | | |
| | IL-15R | | |
| | NKG2D | | |
| IL-15R | CD8 | | |
| | NKG2D | | |
| NKG2D | CD8 | | |
| CD177 | PR3 | ANCA-associated vasculitis | neutrophil infiltrating outside blood |
| | | or systemic lupus | vessel and PR3-presenting neutrophil |
| | | erythematosus | |
| CD4 | CD127 | T cell-dependent immune- | CD4-positive T cell other than Treg |
| | | related disease | |
| CD40 | IL-6 | immune-related disease | activated T cell |
| ligand | | | |
| IL-17R | membrane- | psoriatic arthritis | IL-17R and membrane-associated |
| | associated | | TNF-expresing cell |
| | TNP | | |
| IL-23R | CCR6 | autoimmune disease | Th17 cell |
| | | (Sjogren's syndrome or | |
| | | psoriasis) | |

TABLE 6D

| First | Second | | |
|---|---|---|---|
| antigen | antigen | Disease to be treated | Target cell |
| CD64 | CDE206 | cancer | M2 macrophage |
| CD64 | CD163 | | |
| CD64 | CD68 | | |
| CD153 | CD206 | | |
| CD153 | CD68 | | |
| CD206 | CD68 | | |
| CD14 | CD48 | cancer | myeloid-derived |
| CD14 | CD84 | | suppresor cell |
| CD14 | CD97 | | |
| CD14 | CD305 | | |
| CD15 | CD48 | | |
| CD15 | CD84 | | |
| CD15 | CD97 | | |
| CD15 | CD305 | | |
| CD33 | CD48 | | |
| CD33 | CD84 | | |
| CD33 | CD97 | | |
| CD33 | CD305 | | |
| CD11b | CD48 | | |
| CD11b | CD84 | | |
| CD11b | CD97 | | |
| CD11b | CD305 | | |
| CCR4 | CADM1 | leukemia/lymphoma | tumor cell |
| CCR4 | CD30 | | |
| CCR4 | CD70 | | |
| CD38 | CD138 | leukemia/lymphoma | tumor cell |
| CD38 | BCMA | | |
| BCMA | CD56 | | |
| BCMA | CS1 | | |
| CD40 ligand | CD36 | leukemia/lymphoma | abnormal |
| CD40 ligand | CD62P | | megakaryocyle |
| CD40 ligand | CD63 | | |
| TIM-3 | CD123 | leukemia/lymphoma | tumor cell |
| TIM-3 | CD33 | | |
| TIM-3 | CD47 | | |
| TIM-3 | CD70 | | |
| TIM-3 | CLEC12A | | |
| CD123 | CD33 | | |
| CD123 | CD47 | | |
| CD123 | CD70 | | |
| CD123 | CLEC12A | | |
| CD5 | CD23 | leukemia/lymphoma | tumor cell |
| CD10 | CD20 | leukemia/lymphoma | tumor cell |
| CD5 | CD20 | leukemia/lymphoma | tumor cell |

TABLE 6E

| First | Second | | |
|---|---|---|---|
| antigen | antigen | Disease to be treated | Target cell |
| CD40 | CD80 | inflammatory | activated antigen- |
| | CD86 | disease | presenting cell |
| | ICOS ligand | | |
| | 4-1BB ligand | | |
| | OX40 ligand | | |
| | CD70 | | |
| | GITR | | |
| | PD-L1 | | |
| | PD-L2 | | |
| | B7-DC | | |
| | B7H3 | | |
| | B7H4 | | |
| | B7H5 | | |
| | B7H6 | | |
| | B7H7 | | |
| PTPRS | IL-21R | autoimmune disease | plasmacytoid dendritic |
| | | | cell (pDC), T cell, and |
| | | | B cell |
| | CD36 | | plasmacytoid dendritic |
| | | | cell (pDC), activated |
| | | | T cell, B cell and |
| | | | plasma cell |
| | CD32a | | plasmacytoid dendritic |
| | | | cell (pDC) and |
| | | | myeloid cell |
| OX40 | CD127 | allergic disease | helper T cell other |
| | | | than Treg |
| | CD40 ligand | allergic disease | helper T cell |
| | | | other than Treg |
| | CD8 | vitiligo or psoriasis | CD8 memory T cell |
| | NKG2D | vitiligo or psoriasis | CD8 memory T cell |
| | CD225 | scleroderma | CD8 memory T cell |
| | CRTH2 | allergic disease | activated Th2 cell |
| CRTH2 | CD2 | allergic disease | Th2 cell and innate |
| | | | lymphoid cell |
| | | | (ILC2 cell) |
| | CD7 | allergic disease | Th2 cell and innate |
| | | | lymphoid cell |
| | | | (ILC2 cell) |
| | CD45 | allergic disease | CRTH2-positive |
| | | | blood cell |

[1195] A pharmaceutical composition containing the antibody composition of the present invention can be administered alone as a therapeutic agent, however, it is preferably provided as a pharmaceutical preparation produced by generally mixing it together one or more pharmaceutically acceptable carriers using an arbitrary well known in the technical field of pharmaceutics.

[1196] As the route of administration, it is preferred to use the most effective route in the treatment. For example, oral administration or parenteral administration such as intraoral, intra-airway, intrarectal, subcutaneous, intramuscular, and intravenous administration can be exemplified, and in the case of an antibody composition preparation, preferably, intravenous administration can be exemplified.

[1197] Examples of a dosage form include a spray, a capsule, a tablet, a granule, a syrup, an emulsion, a suppository, an injection, an ointment, a tape, and the like.

[1198] Examples of the pharmaceutical preparation suitable for oral administration include an emulsion, a syrup, a capsule, a tablet, a powder, a granule, and the like.

[1199] A liquid preparation such as an emulsion or a syrup can be produced using, as an additive, water, a saccharide such as sucrose, sorbitol, or fructose, a glycol such as polyethylene glycol or propylene glycol, an oil such as sesame oil, olive oil, or soybean oil, a preservative such as a p-hydroxybenzoate ester, a flavor such as strawberry flavor or peppermint, or the like.

[1200] A capsule, a tablet, a powder, a granule, or the like can be produced using, as an additive, an excipient such as lactose, glucose, sucrose, or mannitol, a disintegrating agent such as starch or sodium alginate, a lubricant such as magnesium stearate or tale, a binder such as polyvinyl alcohol, hydroxypropyl cellulose, or gelatin, a surfactant such as a fatty acid ester, a plasticizer such as glycerin, or the like.

[1201] Examples of the pharmaceutical preparation suitable for parenteral administration include an injection, a suppository, a spray, or the like.

[1202] An injection is prepared using a carrier composed of a salt solution or a glucose solution, or a mixture thereof, or the like. Alternatively, it is also possible to prepare a powder injection by freeze-drying the antibody composition in accordance with a conventional method and adding sodium chloride thereto.

[1203] A suppository is prepared using a carrier such as cacao butter, a hydrogenated fat, or carboxylic acid.

[1204] Further, a spray is prepared using the antibody composition itself, or using a carrier which does not stimulate the buccal or airway mucous membrane of a recipient and facilitates absorption a the antibody composition by dispersing it as fine particles, or the like.

[1205] Specific examples of the carrier include lactose, glycerin, and the like. A pharmaceutical preparation such as an aerosol or a dry powder is possible according to the properties of the antibody composition and the carrier to be used. Further, also for these parenteral preparations, components exemplified as additives for the oral preparations can be added.

[1206] A dose or administration frequency varies depending on a desired therapeutic effect, an administration method, a treatment duration, an age, a body weight, or the like, however, a dose of the active ingredient is generally 10 μg/kg to 20 mg/kg per day for an adult.

[1207] Further, as a method for studying the anti-tumor effect of the antibody composition on various tumor cells, a CDC activity measurement method, an ADCC activity measurement method, arid the like are exemplified as an in vitro experiment, and an anti-tumor experiment, and the like using a tumor system in an experimental animal such as a mouse are exemplified as an in vivo experiment.

[1208] As one aspect of the present invention, a kit including the first and second IgG half-molecules is exemplified. In the kit, other materials including an appropriate container (for example, a bottle, a vial, or a test tube), a label showing explanation or the like, a filter, a needle, a syringe, and an instruction manual may be optionally included.

[1209] In the above kit, in addition to the IgG half-molecule as the active ingredient, for example, sterile water, physiological saline, a vegetable oil, a surfactant, a lipid, a solubilizing agent, a buffer, a protein stabilizer (for example, BSA, gelatin, or the like), a preservative, a blocking solution, a reaction solution, a reaction stopping solution, a reagent for treating a sample, or the like may be mixed as needed.

[1210] Examples of the mode of usage of the kit include (1) a method in which the first IgG half-molocule and the second IgG half-molecule are mixed in advance and then administered, and (2) a method in which the first IgG half-molecule and the second IgG half-molecule are separately administered. Examples of the method (2) in which the first IgG half-molecule and the second IgG half-molecule are separately administered include a method in which the first IgG half-molecule and the second IgG half-molecule are administered simultaneously or sequentially. The amounts and ratios of the first IgG half-molecule and the second IgG half-molecule can be appropriately adjusted.

[1211] Further, as one aspect of the present invention a first IgG half-molecule to be used for producing an antibody composition against a first antigen and a second antigen that are different from each other, the antibody composition including the first IgG half-molecule and a second IgG half-molecule is exemplified.

[1212] As another aspect of the present invention, a second IgG half-molecule to be used for producing an antibody composition against a first antigen and a second antigen that are different from each other, the antibody composition including a first IgG half-molecule and the second IgG half-molecule is exemplified.

[1213] As one aspect of the present invention, a first IgG half-molecule to be used in combination with a second IgG half-molecule is exemplified. Further, as one aspect of the present invention, a second IgG half-molecule to be used in combination with a first IgG half-molecule is exemplified. Here, the use of the first IgG half-molecule and the second IgG half-molecule “in combination” means that first IgG half-molecule and the second IgG half-molecule are administered simultaneously or sequentially so as to form an antibody composition including the first IgG half-molecule and the second IgG half-molecule and includes the half-molecules binding to a first antigen and a second antigen that are different from each other. When the first half-molecule and the second half-molecule are administered simultaneously or sequentially, a case where they are mixed in an injection vial, a case where they are mixed in an infusion bag, a case where they are directly administered to a patient, and a case where they are administered in any form are included in the use of the antibody composition of the present invention.

[1214] Hereinafter, the present invention will be more specifically described by way of Examples, but the present invention is not limited to the following Examples.

### EXAMPLES

[1215] The present inventors conceived that in a constant region of an antibody molecule in the present invention, following elements that are different from a normal human IgG1 antibody are needed,

[1216] 1) As shown in FIG. 4, it is a mixture of antibody half-molocules against different antigen molecules X and Y that is, it is an “HL molecule”0 in which a covalent bond formed by an inter-H chain disulfide bond is not present in a hinge domain.

[1217] 2) As shown in FIG. 3, the molecules against each of the antigen molecules X and bind to the surface of a target cell expressing both X and Y and thereafter are associated with each other to form an H2L2 molecule in the same manner as normal IgG and constitute a CD16a-binding domain to cause an of function (for example, an ADCC activity) of an antibody,

[1218] 3) As shown in FIG. 3. a CD16a-binding domain is not formed even if the HL molecules against X or Y are associated with each other on a cell surface so that the antibody activity is not caused against a cell expressing only a single antigen molecule.

[1219] In this Example, with respect to the above 1), an attempt was made by substituting cysteine of a hinge domain with alanine.

[1220] It is known by X-ray crystallography that Fc of human IgG1 and CD16a show an asymmetric binding mode (Nature 2000, 406: 267-73, J Biol. Chem 2001; 276: 16469-77, Mizushima T, Genes Cells 2011; 16: 1071-80). Therefore, the present inventors conceived that the below-mentioned amino acid alteration utilizing such an asymmetric binding mode is introduced into the CH2 domain of the above-mentioned HL molecules for achieving the above 2) and 3).

[1221] As shown in FIG. 5, CD16a comes into contact with two CH2 domains in Fc at different sites, respectively. The two CH2 domains are tentatively named CH2-A and CH2-B, and an interacting site with CD16a on CH2-A is defined as a region 1, and an interacting site with CD 16a on CH2-B is defined a region 2.

[1222] As the region 1, L235, G236, G237, P238, S239, D265, V266, S267, H268, E269, E294, Q295, Y296, N297, S298, T299, R301, N325, A327, I332, and the like are known. Further, as the region 2 , L235, G236, G237, K326, A327, L328, P329, A330, and the like are known.

[1223] As shown in FIG. 5, due to the symmetry of the structure of Fc, on the opposite side to the actual binding domain where Fc and CD16a are bound, another binding domain that is composed of the region 2 of CH2-A and the region 1 of CH2-B, and is not actually used for binding to CD16a is present.

[1224] As shown in FIG. 6, the region 2 of CH2-A and the region 1 CH2-B that are not used for binding to the CD16a are “disrupted” by introducing an amino acid alteration into each region. In this case, when HL molecules (X) having such altered CH2-A or HL molecules (Y) having such altered CH2-B are homo-associated to form an H2L2 molecule (XX or YY), only the region 1 or only the region 2 is present. Therefore, it is considered that to such a homo assembly, CD16a may not be able to bind with sufficient affinity. On the other hand, it is considered that an H2L2 molecule (XY) in which the HL molecules having such altered CH2-A and altered CH2-B, respectively, as a constituent element are hetero-associated may satisfy the above conditions 2) and 3).

### Example 1

[1225] Production of human IgG1 anti-CCR6 antibody in which CD16a binding was “disrupted”

[1226] In order to speedy a site on CH2 capable of attenuating the binding of CD16a, an antibody in which the above-mentioned region 1 or region 2 was “disrupted” by an amino acid alteration was produced. That is, as shown in FIG. 7, an amino acid residue at a candidate site was altered on a format of normal human IgG1.

[1227] In this case, in order to express human IgG1 as a recombinant antibody, two H chains are encoded by the same gene on an expression vector, and an amino acid residue is simultaneously altered in both without distinction between CH2-A and CH2-B, and the CD16a-binding site is simultaneously disrupted at two sites on both sides, resulting in searching for an altered site for attenuating a ADCC activity.

[1228] Incidentally, in this Example, unless otherwise stated, as all the antibody molecules, antibodies in which α1,6-fucose of the N-linked sugar chain to be bound to asparagine at position 297 of the H chain is not bound so that an ADCC activity is enhanced were produced. Therefore, as the host cell for expressing the antibody, a fucosyltransferase (FUT8) knockout CHO cell (WO 2005/035586 and WO 02/31140) was used.

[1229] (1) Production of Expression Vector for Human IgG Anti-CCR6 Antibody in Which CD16a Binding was “Disrupted”

[1230] In FIGS. 5 and 6, a schematic diagram of the “region 1” and the “region 2” on the CH2 domain is shown. An expression vector for a human IgG1 anti-human CCR6 antibody (WO 2013/005649) in which an amino acid alteration was introduced with respect to amino acid sites P238, P265, arid S267 binding to CD16a in the “region 1” on the CH2 domain and amino acid sites K326, L328, and P329 binding to CD16a in the “region 2” on the CH2 domain for “disrupting” the binding to CD16a as shown in FIG. 6 was constructed. The gene sequences and the amino acid sequences of the antibodies used for the construction are shown in Table 7.

TABLE 7

| | | Amino acid |
|---|---|---|
| Sequence name: | Gene sequence | sequence |
| CCR6 (KG1684) VL | SEQ ID NO: 1 | SEQ ID NO: 2 |
| CCR6 (KG1684) VH | SEQ ID NO: 3 | SEQ ID NO: 4 |
| IgG1 CK | SEQ ID NO: 5 | SEQ ID NO: 6 |
| IgG1 CH | SEQ ID NO: 7 | SEQ ID NO: 8 |
| IgG1 P238A CH | SEQ ID NO: 9 | SEQ ID NO: 10 |
| IgG1 D265A CH | SEQ ID NO: 11 | SEQ ID NO: 12 |
| IgG1 S267L CH | SEQ ID NO: 13 | SEQ ID NO: 14 |
| IgG1 P238A/D265A CH | SEQ ID NO: 15 | SEQ ID NO: 16 |
| IgG1 P238A/S267L CH | SEQ ID NO: 17 | SEQ ID NO: 18 |
| IgG1 D265A/S267L CH | SEQ ID NO: 19 | SEQ ID NO: 20 |
| IgG1 P238A/D265A/S267L CH | SEQ ID NO: 21 | SEQ ID NO: 22 |
| IgG1 K326W CH | SEQ ID NO: 23 | SEQ ID NO: 24 |
| IgG1 L328V CH | SEQ ID NO: 25 | SEQ ID NO: 26 |
| IgG1 P329Y CH | SEQ ID NO: 27 | SEQ ID NO: 28 |
| IgG1 K326W/L328V CH | SEQ ID NO: 29 | SEQ ID NO: 30 |
| IgG1 K326W/P329Y CH | SEQ ID NO: 31 | SEQ ID NO: 32 |
| IgG1 L328V/P329Y CH | SEQ ID NO: 33 | SEQ ID NO: 34 |
| IgG1 K326W/L328V/P329Y CH | SEQ ID NO: 35 | SEQ ID NO: 36 |

[1231] A PCR reaction was carried out in accordance with a package insert of PrimeSTAR Max DNA Polymerase (Takara Bio) using a human IgG1 anti-human CCR6 antibody expression vector pCI-IgG1_KG1684 composed of the base sequences represented by SEQ. ID NOS: 1, 3, 5, and 7 as a template, and also using PrimeSTAR Max DNA Polymerase and primers (Sigma-oligo) into which an altered site was introduced.

[1232] In the PCR reaction, GeneAmip PCR System 9700 Applied Biosystems) was used, and after thermal denaturation at 98° C. for 1 minute, a reaction at 98° C. for 10 seconds, at 58° C. for 5 seconds, and at 72° C. for 5 seconds was carried out 30 cycles. The reaction solution was subjected to electrophoresis using 0.8% agarose gel, and an amplified fragment was recovered using QIAquick Gel Extraction Kit (Qiagen). A ligation reaction with a plasmid pCI vector (Promega) was carried out using In-Fusion HD Cloning Kh (Clontech), and Escherichia coli DH5α competent cells (Takara Bio) were transformed using the reaction solution.

[1233] Each plasmid DNA was prepared from the thus obtained transformant clones and allowed to react using Big Dye Terminator Cycle Sequencing Kit. v3.1 (Applied Biosystems) in accordance with the instruction attached thereto, and then, the base sequence of the DNA inserted into the plasmid was analyzed by a DNA sequencer ABI PRISM 1700 DNA Analyzer of the same company.

[1234] (2) Expression of Human IgGG1 Anti-CCR6 Antibody in Which CD16a Binding was “Disrupted”

[1235] The expression vector produced in (1) was introduced into a host cell by the following method. As the host cell, a FUT8 knockout CHO cell (WO 2005/305586 and WO 02/31140) was used. A method for introducing a plasmid was carried out in accordance with the instruction attached thereto.

[1236] The amount of the culture solution was set to 200 mL, and the culture was carried out for 5 days under the set conditions of 37° C., 5% CO₂, and 125 rpm. After culture, the cell suspension was centrifuged, and passed through a 0.2 μm filter (Thermo Scientific), whereby the culture supernatant containing an altered antibody was recovered.

[1237] The name of a purified antibody sample of each antibody is shown in Table 8.

TABLE 8

| Purified antibody | | |
|---|---|---|
| (name) | Region 1 of CH2 | REgion 2 of CH2 |
| IgG1 | — | — |
| IgG1 P238A | P238A | P238A |
| IgG1 D265A | D265A | D265A |
| IgG1 S267L | S267L | S267L |
| IgG1 P238A/D265A | P238A/D265A | |
| IgG1 P238A/S267L | P238A/S267L | |
| IgG1 D265A/S267L | D265A/S267L | |
| IgG1 P238A/D265A/ | P238A/D265A/ | — |
| S267L | S267L | |
| IgG1 K326W | — | K326W |
| IgG1 L328V | — | L328V |
| IgG1 P329Y | — | P329Y |
| IgG1 K326W/L328V | — | K326W/L328V |
| IgG1 K326W/P329Y | — | K326W/P329Y |
| IgG1 L328V/P329Y | — | L328V/P329Y |
| IgG1 K326W/L328V/ | — | K326W/L328V/ |
| P329Y | | P329Y |

[1238] (3) Purification of Human IgG1 anti-CCR6 antibody in Which CD16a Binding was “Disrupted”

[1239] The altered antibody was purified by affinity purification using MabSelect SuRe (GE Healtheare) shown below. After a resin was equilibrated with PBS, the culture supernatant obtained in (2) was loaded, followed by washing twice with PBS. After washing, the antibody was eluted using an elution buffer (100 mM citric acid, pH 3.5), followed by neutralization by adding 1 /10 amount of a neutralization buffer (2 M Tris-HCl, pH 8.0).

[1240] Subsequently, concentration and replacement with buffer (10 mM citric acid, 150 mM, NaCl, pH 6.0) by ultrafiltration were carried out using Amicon Ultra-4 Centerifugal Filter Units (Millipore), and an absorbance (A280) at 280 nM was measured using NanoDrop 8000 (Thermo Scientific), whereby the concentration measurement and preparation of an antibody solution were carried out.

[1241] (4) Evaluation of Purification Degree by SDS-PAGE of Human IgG1 Anti-CCR6 Antibody in Which CD16a Binding was “Disrupted”

[1242] In order to evaluate the purification degree of the purified samples of various types of CD16-binding-deficient human IgG1 anti-CCR6 antibodies, by using about 1 μg of each antibody purified sample, SDS denaturing polyacrylamide gel electrophoresis (hereinafter referred to as SDS-PAGE) was carried out according to a known method [Nature, 227, 680 (1970)].

[1243] As a result, under reducing conditions, in the various types of CD16-binding-deficient human IgG1 anti-CCR6 antibodies, in the same manner as in the normal IgG1 type, a band was observed in the vicinity of about 50 kilodaltons (hereinafter referred to as kDa) for the H chain and in the vicinity of about 25 kDa for the L chain. Further, under non-reducing conditions, a band was observed in the vicinity of about 150 kDa, and therfore, it was confirmed that the produced anti-CCR6 domain-exchanged antibodies are constituted by the target H chain and L chain.

[1244] From the above results, it was confirmed that in the purified samples of various types of CD16-binding-deficient human IgG1 anti-CCR6 antibodies obtained in the section 3 of this Example target IgG molecules each constituted by the H chain and the L chain are contained at a sufficient ratio.

[1245] (5) ADCC Activity of Human IgG1 Anti-CCR6 Antibody in Which CD16a-binding Domain was “Disrupted”

[1246] As the effector cell, an NK-92ICD16 transfectant obtained by transfecting NK-92 (ATCC) that is an NK cell line with a DNA encoding human CD16a (Val type) to stably express it was used, and as the target cell, a human CCR6/CHO transfectant was used. The respective cultured cells were recovered and counted, and then prepared using RPMI medium (phenol red-free RPMI 1640 medium supplemented with 5% FBS/1% PS) at a cell density of 8×10⁵ cells/mL and 2 cells/mL, respectively.

[1247] Alter the antibody solution was dispensed into a 96- well plate at 50 μL/well with a continuous dispenser, and thereafter, the target cells were dispensed at 50 μL/well. The effector cells were dispensed at 50 μL/well, followed by centrifugation at 1800 rpm for 2 minutes, and it was confirmed that the cells were evenly seeded.

[1248] After the plate was left to stand at 37° C. for 3 hours and 15 minutes in a CO₂ incubator, 10/1 amount of a solubilizing solution was dispensed into a Total control, and the plate was left to stand at 37° C. for 45 minutes. After centrifugation at 1800 rpm for 2 minutes, 50 μL of the supernatant was dispensed into an ELISA plate. A substrate (powder) was dissolved in 12 mL of a suspension buffer to prepare a coloring solution, and the coloring solution was applied at 50 μL/well to cause a reaction. A stopping solution was added at 50 μL/well, and an absorbance (A450) was measured using a plate reader.

[1249] Note that as a kit for ADCC measurement CytoTox 96(R) Non-Radioactive Cytotoxicity Assay (Promega) was used. An ADCC activity (%) was calculated using the following formula.

ADCC activity(%)=100×(S−E−T)/(Max−T)

[1250] S=absorbance of sample reaction well—absorbance of culture medium well

[1251] E=absorbance of effector well—absorbance of culture medium well

[1252] T=absorbance of target well—absorbance of culture medium well

[1253] Max=100% reaction well—100% reaction control well

[1254] The results are shown in FIG. 8. As shown in FIG. 8, it was confirmed that in the region 1 of CH2, in variants composed of IgG1_D265A, IgG1_P238A/S267L, or IgG1_D265A/S267L, the ADCC activity is significantly attenuated against the target cells.

[1255] Further, it was confirmed that in the region 2 of CH2, in variants composed of IgG1_P329Y, IgG1_K326W/P329Y, IgG1_L328V/P329Y, or IgG1_K326W/L328V/P329Y, the ADCC activity is significantly attenuated, and it was found that P329Y alteration is included in any of the variants.

[1256] From the above results, it was revealed that the CD16a-binding site can be disrupted by introducing an amino acid alteration of D265A or P238A/S267L in the “region 1” on the CH2 domain, and by introducing an amino acid alteration of at least P329Y in the “region 2” on the CH2 domain.

### Example 2

[1257] Production of human IgG1 anti-CCR6 monovalent antibody into which CD16a-binding asymmetric alteration was introduced

[1258] As an example of an amino acid sequence capable of disrupting an asymmetric binding site of CD16a to Fc in Example 1, D265A or P238A/S267L derived from the “region 1” was selected CH2-A, and P329Y derived from the “region 2” was selected in CH2-B.

[1259] In this section, in order to evaluate an ADCC activity by asymmetrically introducing the above-mentioned alterations into only CH2-A and CH2-B, respectively, “a monovalent antibody” in which individual genes encoding two molecules of H chain are expressed, and the molecules can be hetero-associated (WO 2011/108502) was used as a basic skeleton. In FIG. 9, a schematic diagram of one embodiment of such a monovalent antibody is shown. In FIG. 9. the above-mentioned hetero assembly is “asymmetric variant #1”.

[1260] (1) Production of Expression Vector for CD16a-binding Asymmetrically Altered Monovalent Antibody

[1261] An expression vector for a human IgG1 anti-CCR6 monovalent antibody into which CH2-A (D265A or P238A/S267L) and CH2-B (P329Y) were asymmetrically or symmetrically introduced (WO 2011/108502) was constructed.

[1262] A PCR reaction was carried out in accordance with a package insert of PrimeSTAR Max DNA Polymerase (Takara Bio) using the human IgG1 anti-CCR6 monovalent antibody expression vector pC1-mvCG1_KG1684 as a template, and also using PrimeSTAR Max DNA Polymerase and primers (Sigma-oligo) into which an altered site was introduced.

[1263] In the PCR reaction, GeneAmp PCR System 9700 (Applied Biosystems) was used, and after thermal denaturation at 98° C. for 1 minute, a reaction at 98° C. for 10 seconds, at 58° C. for 5 seconds, and at 72° C. for 5 seconds was carried out 30 cycles.

[1264] The reaction solution was subjected to electrophoresis using 0.8% agarose gel, and an amplified fragment was recovered using QIAquick Gel Extraction Kit (Qiagan). A ligation reaction with a plasmid pCI vector (Promega) was carried out using In-Fusion HD Cloning Kit (Clontech), and Escherichia coli DH5α competent cells (Takara Bio) were transformed using the reaction solution.

[1265] Each plasmid DNA was prepared from the thus obtained transfomant clones and allowed to react using Big Dye Terminator Cycle Sequencing Kit v3.1 (Applied Biosystems) in accordance with the instruction attached thereto, and then, the base sequence of the DNA inserted into the plasmid was analyzed by a DNA sequencer ABI PRISM 3700 DNA Analyzer of the same company.

[1266] (2) Expression of CD16a-binding Asymmetrically Altered Monovalent Antibody

[1267] The expression of the antibody was carried out in the same manner as in the section 2 of Example 1, and the culture supernatant containing the antibody was recovered. Each purified antibody sample and an altered site thereof are shown in Table 9. Note that an amino acid residue substitution at the altered site was carried out in the same manner as in Example 1.

TABLE 9

| Purified antibody | CH2-A | CH2-B |
|---|---|---|
| (name) | (Region 1, Region 2) | (Region 1, Region 2) |
| wild type | — | — |
| asymmetric variant #1 | D265A | P329Y |
| asymmetric variant #2 | P329Y | D26SA |
| asymmetric vanant #3 | P238A/S267L | P329Y |
| asymmetric variant #4 | P329Y | P238A/S267L |
| symmetric variant #1 | D265A | D2654 |
| symmetric variant #2 | P329Y | P329Y |
| symmetric variant #3 | P238A/S267L | P238A/S267L |
| symmetric variant #4 | D265A, P329Y | D265A, P329Y |
| symmetric variant #5 | P238A/S267L, P329Y | P238A/S267L, P329Y |

[1268] (3) Purification of CD16a-binding Asymmetrically altered monovalent antibody

[1269] The purification of the antibody was carried out in the same manner as in the section 3 of Example 1. As the elution buffer, 100 mM citric acid, pH 3.9 was used. Thereafter, a monomer fraction was fractionated from the antibody solution using AKTA FPLC (GE Healthcare) and Superdex High-performance Column (GE Healthcare). By performing filter sterilization with a membrane filter (Millex-GV, Millipore) with a pore diameter of 0.22 μm of an AKTA system, a purified antibody was obtained. An absorbance (A280) at 280 nm was measured using NanoDrop 8000 (Thermo Scientific).

[1270] (4) Evaluation of Purification Degree by SDS-PAGE of Human IgG1 anti-CCR6 Monovalent Antibody into Which CD16a-binding Asymmetric Alteration was Introduced

[1271] In order to evaluate the purification degree of the purified samples of human IgG1 anti-CCR6 monovalent antibodies into which various types of CD16a-binding asymmetric alterations were introduced, SDS-PAGE was carried out using about 1 μg of each antibody purified sample.

[1272] As a result, under reducing conditions, in all the variants, a band was observed in the vicinity of about 50 kD for the H chain and the Fc-fused L-chain in the same manner as in the wild-type monovalent antibody. Further, under non-reducing conditions, a band was observed in the vicinity of about 100 kDa, and therefore, it was confirmed that the produced asymmetric variants and symmetric variants are constituted by the target H chain and L chain.

[1273] From the above results, it was confirmed that in the purified samples of human IgG1 anti-CCR6 monovalent antibodies into which various types a CD16a-binding asymmetric alterations were introduced obtained in the section 3 of this Example, target monovalent antibody molecules each constituted by the H chain and the Fc-fused L chain are contained at a sufficient ratio.

[1274] (5) ADCC Activity of CD16a-binding Asymmetrically Altered Monovalent Antibody

[1275] An ADCC activity was measured in the same manner as in the section 5 of Example 1. The results are shown in FIG. 10. As shown in FIG. 10, it was confirmed that the monovalent antibodies (asymmetric variarits #1 to 4) into if a CD16a-binding asymmetric alteration was introduced damage the target cells in an antibody concentration-dependent manner. On the other hand, it was confirmed that the monovalent antibodies (symmetric variants #1 to #5) into which a CD16a-binding symmetric alteration was introduced do not show an ADCC activity against the target cells.

[1276] From the above results, it was confirmed that a monovalent antibody into which a CD16a-binding asymmetric alteration was introduced maintains the binding activity to human CD16a and can exhibit an ADCC activity against the target cells.

[1277] On the other hand, when the same alteration is introduced into both CH2 domains, an ADCC activity is lost, and therefore, it was confirmed that ADCC activity is not induced when antibodies having the same altered CH2 are homophilically associated on a cell surface, and altered CH2 domains for constituting an HL antibody that exhibits an ADCC activity only when it is hetero-associated with two antigens on a cell surface aimed at by the present invention were found.

### Example 3

[1278] In this Example, it was verified whether or not an ADCC activity can be induced specifically for a target cell coexpressing two types of antigens by mounting altered CH2 molecules that were obtained in Examples 1 and 2 and can induce an ADCC activity only when they are hetero-associated on two types of antibody half-molecules (HL molecules) against different antigens.

[1279] An interaction between CH3 domains has been reported in J. Immunol. 2011; 187: 3238-3246. The interaction (K_{D} value) of the CH3 domains of human IgG1 is 3.0×10⁻⁹ M, the K_{D} value of the CH3 domains of human IgG4 is 4.8×10⁻⁸ M, so that the interaction between the CH3 domains of human IgG4 is about 6 to 7 times weaker an that of IgG1.

[1280] The production of an antibody half-molecule was attempted by utilizing this property and an amino acid alteration (C226A/C229A: AA) for cleaving an inter-H chain disulfide bond in a range domain. A domain-exchanged antibody (hereinafter referred to as IgG1114_AA type) in which for the H chain constant region of a half-molecule, human IgG1 was used as a basic skeleton, and only the CH3 domain was exchanged with a human IgG4 sequence, and further, an amino acid alteration (AA) was added to the hinge domain was used.

[1281] In addition, in order to enhance an ADCC activity, a known ADCC activity enhancing amino acid alteration was made in the CH2 domain, and further, α1,6-fucose of the N-linked sugar chain that is bound to Asn297 was removed, and finally, a CD16a-binding asymmetric amino acid alteration was introduced. In FIG. 1 a schematic diagram of an IgG1114_AA_AAA_D265A (/P329Y)-type IgG half-molecule is shown. As two types of model antigens, CD4 and CD70 were used.

[1282] An anti-CD4 antibody (J. Immunol, 1992; 149: 1779-1787) and an anti-CD70 antibody (WO 2007/03637) in which the above-mentioned alterations were combined were produced according to the following procedure. The anti-CD4 and anti-CD70 antibodies having an H chain constant region constituted by an amino acid sequence in which a known ADCC activity enhancing amino acid alteration (S298A/E333A/K334A: AAA) alteration and a CD16a-binding asymmetric amino acid alteration (D265A or P329Y) were introduced into the IgG1114_AA type are referred to as an IgG1114_AA_AAA_D265A (/P329Y)-type anti-CD4 antibody half-molecule, and an IgG1114_AA_AAA_D265A (/P329Y)-type anti-CD70 antibody half-molecule, respectively:

[1283] A subclass from which each domain of various types of designed anti-CD4 antibody half-molecules and anti-CD70 antibody half-molecules is derived, and the correspondence of the amino acid sequence of the H chain constant region are shown in Table 10. Further, the base sequences and the amino acid sequences of antibodies against CD4 and CD70 used are shown in Table 11.

TABLE 10

| | | | | | Gene and amino acid |
|---|---|---|---|---|---|
| Structure name | CH1 | Hinge | CH2 | CH3 | sequences |
| IgG1114_AA_AAA_D265A | G1 | G1(AA) | G1(AAA_D265A) | G4 | SEQ ID NOS: 37 and 38 |
| IgG1114_AA_AAA_P329Y | G1 | G1(AA) | G1(AAA_P329Y) | G4 | SEQ ID NOS: 39 and 40 |

TABLE 11

| Sequence name | Gene sequence | Amino acid sequence |
|---|---|---|
| CD4 (ibalizumab) VL | SEQ ID NO: 41 | SEQ ID NO: 42 |
| CD4 (ibalizumab) VH | SEQ ID NO: 43 | SEQ ID NO: 44 |
| CD70 (2H5) VL | SEQ ID NO: 45 | SEQ ID NO: 46 |
| CD70 (2H5) VH | SEQ ID NO: 47 | SEQ ID NO: 48 |

[1284] (1) Production of Expression Vector for and CD4 Antibody Half-Molecule and Anti-CD70 Antibody Half-Molecule

[1285] A DNA fragment of about 9 kbp was cut out using restriction enzymes NheI and NotI from a human IgG1 anti-CD4 antibody expression vector pCI-IgG1_CD4 (ibalizumab) (SEQ ID NOS: 5, 7, 41, and 43) or a human IgG1 anti-CD 70 antibody expression vector pC1-IgG1_CD70 (2H5) (SEQ ID NOS: 5, 7, 45, and 47), and purified.

[1286] A ligation reaction of the purified DNA fragment with an artificial synthetic gene compo ed of the CH1 domain, the hinge domain (to which a C226A/C229A alteration was added) and the CH2 domain (to which a S298A/K333A/E334A alteration and a D265A or P329Y alteration were added) of a human IgG1 antibody, and the CH3 domain of a human IgG4 antibody was carried cot using In-Fusion HD Cloning Kit (Clontech), and Escherichia coli DH5α competent cells (Takara Bio) were transformed using the reaction solution. Each plasmid DNA was prepared from the obtained transformant clones, and the base sequence of the DNA was analyzed by Fasmac.

[1287] (2) Expression of Various Types of Anti-CD4 IgG1 Antibodies and Anti-CD70 IgG1 Antibodies and Half-Molecules of These Antibodies

[1288] The expression of the antibody was carried out in the same manner as in the section 2 of Example 1, and the culture supernatant containing the antibody was recovered.

[1289] The names of the purified antibody samples are shown in Table 12.

TABLE 12

| Purified antibody (name) | Structure of antibody |
|---|---|
| CD4 antibody | IgG1 |
| CD70 antibody | igG1 |
| CD4 antibody half molecule 1 | IgG1114_AA_AAA_D265A |
| CD4 antibody half molecule 2 | IgG1114_AA_AAA_P329Y |
| CD70 antibody half molecule 1 | IgG1114_AA_AAA_D265A |
| CD70 antibody half molecule 2 | IgG1114_AA_AAA_P329Y |

[1290] (3) Purification of Anti-CD4 Antibody Half-Molecule and Anti-CD70 Antibody Half-Molecule

[1291] The purification of the antibody was carried out in the same manner as in the section 3 of Example 1, and the concentration measurement and preparation of an antibody solution were carried out.

[1292] (4) Evaluation of Purification Degree by SDS-PAGE of anti-CD4 Antibody Half-Molecule and Anti-CD70 Antibody Half-Molecule

[1293] In order to evaluate the purification degree of the prepared various types of antibody samples, SDS-PAGE was carried out using about 1 μg of each antibody purified sample. The results are shown in FIG. 12.

[1294] As shown in FIG. 12, in all the purified antibodies, under reducing conditions, a band was observed in the vicinity of about 50 kDa for the H chain and in the vicinity of about kDa for the is chain. Further, under non-reducing conditions, a band was observed in the vicinity of about 150 kDa for the anti-CD4 IgG1 antibody and the anti-CD70 IgG1 antibody, and in the vicinity of about 75 kDa for the anti-CD4 half-molecule and the anti-CD70 half-molccule, and therefore, it was confirmed that the produced anti-CD4 IgG1 antibody and anti-CD70 IgG1 antibody are each an antibody structure constituted by the target H chain and L chain, and the anti-CD4 antibody half-molecule and the anti-CD70 antibody half-molecule are each constituted by the target H chain and L chain, and have an antibody structure that easily forms a half-molecule.

[1295] From the above results, it was confirmed that in the purified samples of the anti-CD4 antibody half-molecule and the anti-CD70 antibody half-molecule obtained in the section 3 of this Example, the target antibody molecule is contained at a sufficient ratio.

[1296] (5) ADCC Activity of Anti-CD4 IgG1 Antibody and Anti-CD70 IgG1 Antibody, and Half-Molecules of These Antibodies Against CD4/CD70 Double-Positive Cell, and CD4 and CD70 Single-Positive Cells

[1297] An ADCC activity was measured in the same manner as in the section 5 of Example 1. As for the target cell, CD4/EL-4 transfectant was used as a CD4 single-positive cell, MT-1 was used as a CD70 single-positive cell, and TL-Om1 was used as a CD4/CD70 double-positive cell. The results of measuring the expression levels of CD4 and CD70 in these cells using a flow cytometer are shown in FIG. 13.

[1298] As shown in FIG. 13, it was confirmed that the target antigen was expressed in the cells. Further, the results of evaluating the ADCC activity are shown in FIG. 14. As the positive control antibody, the anti-CD4 IgG1 antibody and the anti-CD70 antibody were used.

[1299] As shown in FIG. 14, it was demonstrated as expected that the anti-CD4 antibody exhibits an ADCC activity against the CD4/EL-4 transfectant, the anti-CD70 antibody exhibits an ADCC activity against MT-1, and the anti-CD4 antibody and the anti-CD70 antibody exhibit an ADCC activity against TL-Om1.

[1300] On the other hand, an antibody solution obtained by mixing the anti-CD4 antibody half-molecule 1 and the anti-CD70 antibody half-molecule 2 or an antibody solution obtained by mixing the anti-CD4 antibody half-molecule 2 and the anti-CD70 antibody half-molecule 1 does not exhibit an ADCC activity against the CD4 and CD 70 single-positive cells, but exhibits ADCC activity specifically only against the CD4/CD70 double-positive cell.

### Example 4

[1301] It was verified whether or not ADCC activity can be induced specifically against a target cell coexpressing two types of antigens by mounting altered CH2 in which CD16a binding was disrupted by amino acid residue alteration at position 235, position 239, position 265, position 267, position 269, position 296, position 298, position 299, or position 327 numbered according to the EU index in the first CD16a-binding domain, and at position 326, position 328 position 329, or position 330 numbered according to the EU index in the second CD16a-binding domain on the half-molecules (HL molecules) of two types of antibodies against different antigens.

[1302] Designed various types of anti-CD4 antibody half-molecules and anti-CD70 antibody half-molecules were prepared in the same manner as in Example 3, and an ADCC activity was evaluated. An antibody solution obtained by mixing the anti-CD4 half-molecule and the anti-CD70 half-molecule was added to give 1μg/mL. Similarly, the anti-CD4 IgG1 antibody and the anti-CD70 IgG1 antibody used as the positive control antibody were also added to give 1 μg/mL. A subclass from which each domain of various types of designed anti-CD4 antibody half-molecules and anti-CD70 antibody half-molecules is derived, and the correspondence of the amino acid sequence of the H chain constant region are shown in Table 13.

TABLE 13

| | | SEQ ID | |
|---|---|---|---|
| Purified antibody (name) | Structure of anibody | NO | |
| CD4 antibody half-molecule 3 | IgG1114_AA_AAA_S239R CH | 49 | gene sequence |
| CD4 antibody half-molecule 3 | IgG1114_AA_AAA_S239R CH | 50 | amino acid sequence |
| CD4 antibody half-molecule 4 | IgG1114_AA_AAA_D265N CH | 51 | gene sequence |
| CD4 antibody half-molecule 4 | IgG1114_AA_AAA_D265N CH | 52 | amino acid sequence |
| CD4 antibody half-molecule 5 | IgG1114_AA_AAA_D265E CH | 53 | gene sequence |
| CD4 antibody half-molecule 5 | IgG1114_AA_AAA_D265E CH | 54 | amino acid sequence |
| CD4 antibody half-molecule 6 | IgG1114_AA_AAA_S267K CH | 55 | gene sequence |
| CD4 antibody half-molecule 6 | IgG1114_AA_AAA_S267K CH | 56 | amino acid sequence |
| CD4 antibody half-molecule 7 | IgG1114_AA_AAA_E269P CH | 57 | gene sequence |
| CD4 antibody half-molecule 7 | IgG1114_AA_AAA_E269P CH | 58 | amino acid sequence |
| CD4 antibody half-molecule 8 | IgG1114_AA_AAA_Y296P CH | 59 | gene sequence |
| CD4 antibody half-molecule 8 | IgG1114_AA_AAA_Y296P CH | 60 | amino acid sequence |
| CD4 antibody half-molecule 9 | IgG1114_AA_AAA_S298E CH | 61 | gene sequence |
| CD4 antibody half-molecule 9 | IgG1114_AA_AAA_S298E CH | 62 | amino acid sequence |
| CD4 antibody half-molecule 10 | IgG1114_AA_AAA_T299A CH | 63 | gene sequence |
| CD4 antibody half-molecule 10 | IgG1114_AA_AAA_T299A CH | 64 | amino acid sequence |
| CD4 antibody half-molecule 11 | IgG1114_AA_AAA_L235R CH | 65 | gene sequence |
| CD4 antibody half-molecule 11 | IgG1114_AA_AAA_L235R CH | 66 | amino acid sequence |
| CD4 antibody half-molecule 12 | IgG1114_AA_AAA_A327I CH | 67 | gene sequence |
| CD4 antibody half-molecule 12 | IgG1114_AA_AAA_A327I CH | 68 | amino acid sequence |
| CD70 antibody half-molecule 3 | IgG1114_AA_AAA_K326G CH | 69 | gene sequence |
| CD70 antibody half-molecule 3 | IgG1114_AA_AAA_K326G CH | 70 | amino acid sequence |
| CD70 antibody half-molecule 4 | IgG1114_AA_AAA_L328R CH | 71 | gene sequence |
| CD70 antibody half-molecule 4 | IgG1114_AA_AAA_L328R CH | 72 | amino acid sequence |
| CD70 antibody half-molecule 5 | IgG1114_AA_AAA_P329K CH | 73 | gene sequence |
| CD70 antibody half-molecule 5 | IgG1114_AA_AAA_P329K CH | 74 | amino acid sequence |
| CD70 antibody half-molecule 6 | IgG1114_AA_AAA_P329W CH | 75 | gene sequence |
| CD70 antibody half-molecule 6 | IgG1114_AA_AAA_P329W CH | 76 | amino acid sequence |
| CD70 antibody half-molecule 7 | IgG1114_AA_AAA_A330P CH | 77 | gene sequence |
| CD70 antibody half-molecule 7 | IgG1114_AA_AAA_A330P CH | 78 | amino acid sequence |

[1303] As shown in FIGS. 15A to 15H, it was demonstrated that the antibody solution obtained by mixing the anti-CD4 antibody half-molecule mounted with CH12 with an amino acid alteration in the first CD16a-binding domain and the anti-CD70 antibody half-molecule mounted with CH2 with an amino acid alteration in the second CD16a-binding domain does not exhibit an ADCC activity against the CD4 and CD70 single-positive cells, but exhibits an ADCC activity specifically only against the CD4/CD70 double-positive cell.

### Example 5

[1304] Search for CD16a-Binding Enhancing Amino Acid Alteration

[1305] Many known amino acid alterations for enhancing binding to CD16a at known in addition to the S298A/E333A/K334A alteration (WO 99/51642, WO 2006/020114, WO 2004/099249, WO 2004/063351, and WO 2013/118858). In this Example, CD16a-binding enhancing amino acid alterations other than the S298A/E333A/K334A alteration were confirmed.

[1306] (1) Production of Expression Vector for Human IgG1 anti-CCR4 Antibody in Which CD16a-binding Enhancing Amino acid alteration was Introduced

[1307] An expression vector for an antibody in which a CD16a-binding enhancing amino acid alteration was introduced into a human IgG1 anti-human CCR4 antibody (WO 2005/053741) was constructed. A DNA fragment of about 9 kbp was cut out using restriction enzymes NheI and NotI from a human IgG1 anti-CCR4 antibody expression vector pCI-IgG1_CCR4 (KM2160) (SEQ ID NOS: 5, 7, 79, and 81), and purified.

[1308] A ligation reaction of the purified DNA fragment with an artificial synthetic gene composed of the Fc of the antibody in which the CD16a-binding enhancing amino acid alteration was introduced was carried out using In-Fusion HD Cloning Kit (Clontech), and Escherichia coli DH5α competent cells (Takara Bio) were transformed using the reaction solution. Each plasmid DNA was prepared from the obtained transformant clones, and the base sequence of the DNA was analyzed by Fasmac.

[1309] (2.) Expression of Human IgG1 Anti -CCR4 Antibody in Which CD16a-binding Enhancing Amino Acid Alteration was Introduced

[1310] The expression vector produced in (1) was introduced into a host cell by the following method. As the host cell, a FUT8 knockout CHO cell (WO 2005/035586 and WO 02/31140) was used. A method for introducing a plasmid was carried out in accordance with the instruction attached thereto.

[1311] The amount of the culture solution was set to 200 mL, and the culture was carried out for 5 days under the set conditions of 37° C., 5% CO₂ and 125 rpm. After culture, the cell suspension was centrifuged, and passed through a 0.2 μm filter (Thermo Scientific), whereby the culture supernatant containing an altered antibody was recovered.

[1312] (3) Purification of Human IgG1 Anti-CCR4 Antibody in Which CD16a-binding Enhancing Amino Acid Alteration was Introduced

[1313] The altered antibody was purified by affinity purification using MabSelect SuRe (GE Healtheare) shown below. After a resin was equilibrated with PBS, the culture supernatant obtained in (2) was loaded, followed by washing twice with PBS. After washing the antibody was eluted using an elution buffer (100 mM citric acid, pH 3.5), followed by neutralization by adding 1/10 amount of a neutralization buffer (2 M Tris-HCl, pH 8.0).

[1314] Subsequently, concentration and replacement with butter (10 mM citric acid, 150 mM NaCl, pH 6.0) by ultrafiltration were carried out using Amicon Ultra -4 Centerifugal Filter Units (Millipore), and an absorbance (A280) at 280 nM was measured using NanoDrop 8000 (Thermo Scientific), whereby the concentration measurement and preparation of an antibody solution were carried out.

[1315] (4) Evaluation of Purification Degree of Human IgG1 Anti-CCR4 Antibody in Which CD16a-binding Enhancing Amino Acid Alternation was Introduced

[1316] In order to evaluate the purification degree of the prepared various types of antibody samples, by using about 1 μg of each antibody purified sample, gel electrophoresis (LabChip GX, PerkinElmer) was carried out, and as a result, in all the purified antibodies, under reducing conditions, a band was observed in the vicinity of about 50 kDa for the H chain and in the vicinity of about 25 kDa for the L chain. Further, under non-reducing conditions, a band was observed in the vicinity of about 150 kDa, and therefore, it was confirmed that the produced anti-CCR4 IgG1 antibody is an antibody structure constituted by the target H chain and L chain.

[1317] (5) ADCC Activity of Human IgG1 Anti-CC4 Antibody in Which CD16a-binding Enhancing Amino Acid Alteration was Introduced

[1318] An ADCC activity was measured in the same manner as in Example 1 (5). As the target cell, TL-Om1 (CCR4-positive cell) was used. SEQ ID NOS of the base sequences and the amino acid sequences of VH and VL of the used anti-CCR4 antibody are shown in Table 14, and the base sequence and the ammo acid sequence of al of each anti-CCR4 antibody in which a CD16a-binding enhancing ammo acid alienation was introduced are shown in Tables 15 and 16.

TABLE 141

| | SEQ ID NO of | SEQ ID NO of |
|---|---|---|
| Sequence name | base sequence | amino acid sequence |
| CCR4 (KM2160) VH | 79 | 80 |
| CCR4 (KM2160) VL | 11 | 82 |

[1319] The results of evaluating the ADCC activity are shown in the following Tables 15 and 16. The ADCC activity of the antibody in which any of various types of amino acid alterations was introduced was calculated while taking the ADCC activity of the IgG1 antibody including the S298A/E333A/K334A (AAA) alteration at 0.1 μg/mL as 100.

TABLE 15

| | relative ADCC | SEQ ID | SEQ ID |
|---|---|---|---|
| CD16a-binding enhancing amino acid alteration | activity | NO of CH | NO of CH |
| intoduced into IgG1 anti-CCR4 antibody | (AAA = 100) | (base sequence) | (amino acid sequence) |
| S298A/E333A/K334A (AAA) | 100 | 83 | 84 |
| S239D/I332E (DE) | 201 | 85 | 86 |
| S239D/A330F | 161 | 87 | 88 |
| S239D/K326T | 179 | 89 | 90 |
| S298A/E333A/K334A (AAA)/P247L | 160 | 91 | 92 |
| S298A/E333A/K334A (AAA)/R293P | 125 | 93 | 94 |
| S298A/E333A/K334A (AAA)/H268E | 164 | 95 | 96 |
| S298A/E333A/K334A (AAA/K326T | 136 | 97 | 98 |
| S298A/E333A/K334A (AAA)/P247L/N421K | 175 | 99 | 100 |
| S298A/E333A/R292L/K334E | 163 | 101 | 102 |
| S298A/E333A/K334A (AAA)/P329R | 5 | 103 | 104 |
| S298A/E333A/K334A (AAA)/A330F | 96 | 105 | 106 |
| S298A/E333A/K334E | 114 | 107 | 108 |
| S298A/E333A/K334A (AAA)/A339T | 36 | 109 | 110 |
| S298A/E333A/K334A (AAA)/F372Y | 70 | 111 | 112 |
| S298A/E333A/K334A (AAA)/V379M | 51 | 113 | 114 |
| S298A/E333A/K334A (AAA)/S239D/I332E | 119 | 115 | 116 |
| S298A/E333A/K334A (AAA)/E283L | 82 | 117 | 118 |
| S298A/E333A/K334A | −97 | 119 | 120 |
| S298A/E333A/K334A (AAA)/E294W | 171 | 121 | 122 |
| S298A/E333A/K334A (AAA)/Q295T | 4 | 123 | 124 |
| S298A/E333A/K334A (AAA)/A327D | −28 | 125 | 126 |
| S298A/E333A/K334A (AAA)/L235T | −69 | 127 | 128 |
| S298A/E333A/K334A (AAA)/G236S | −46 | 129 | 130 |
| S298A/E333A/K334A (AAA)/S239D | 291 | 131 | 132 |
| S298A/E333A/K334A (AAA)/F243L | 79 | 133 | 134 |
| S298A/E333A/K334A (AAA)/K248M | 165 | 135 | 136 |
| S298A/E333A/K334A (AAA)/E258H | 94 | 137 | 138 |
| S298A/E333A/K334A (AAA)/D265G | −89 | 139 | 140 |
| S239D | 116 | 141 | 142 |
| S239E | 88 | 143 | 144 |

TABLE 16

| CD16a-binding enhancing | relative ADCC | SEQ ID | SEQ ID |
|---|---|---|---|
| amino acid alteration introduced | activity | NO of CH | NO of CH |
| into IgG1 anti-CCR4 antibody | (AAA = 100) | (base sequence) | (amino acid sequence) |
| S239D/I332D | 150 | 145 | 146 |
| S239D/I332T | 72 | 147 | 148 |
| S239D/I332L | 82 | 149 | 150 |
| S239D/I332A | 94 | 151 | 152 |
| S239D/I332Y | 123 | 153 | 154 |
| S239D/I332F | 93 | 155 | 156 |
| S239D/I332W | 94 | 157 | 158 |
| S239D/I332H | 84 | 159 | 160 |
| S239D/K326L | 113 | 161 | 162 |
| S239D/K326E | 147 | 163 | 164 |
| S239D/L326I | 146 | 165 | 166 |
| S239E/I332Y | 130 | 167 | 168 |
| S239E/I332F | 34 | 169 | 170 |
| S239E/I332W | 44 | 171 | 172 |
| S239E/I332H | 71 | 173 | 174 |
| S239E/I332E | 153 | 175 | 176 |
| S239E/I332E | 90 | 177 | 178 |
| S239E/I332T | 52 | 179 | 180 |
| S239E/I332L | 57 | 181 | 182 |
| S239E/I332A | 62 | 183 | 184 |
| S239E/K326T | 132 | 185 | 186 |
| S239E/K326L | 109 | 187 | 188 |
| S239E/K326E | 129 | 189 | 190 |
| S239E/K326I | 135 | 191 | 192 |
| F243L/R292P/Y300L | 3 | 193 | 194 |
| F243L/R292P/Y300L/V305I/P396L | −9 | 195 | 196 |
| P230A/E233D/I332E | 53 | 197 | 198 |
| K288N/A330S/P396L | −131 | 199 | 200 |
| K334E/T359N/T366S | −110 | 201 | 202 |
| G316D/A378V/D399E | −38 | 203 | 204 |

[1320] As shown in Tables 15 and 16, CD16a-binding enhancing amino acid alterations applicable to the antibody composition of the present invention were confirmed other than S298A/E333A/K334A (AAA).

### Example 6

[1321] Amino Acid Substitution in CH3 Domain of IgG1

[1322] In Example 3, it was shown that the ADCC activity is exhibited specifically for the CD4/CD70 double-positive cell using the IgG half-molecule of IgG1114_AA_AAA_D265A (/P329Y). As the portion corresponding to the CH3 domain of the Fc region of the antibody used here, the sequence of human IgG4 is used.

[1323] An interaction between CH3 domains has been reported in J. Immunol. 2011; 187: 3238-3240, and the interaction (K_{D} value) of the CH3 domains of human IgG1 is 3.0'10⁻⁹ M, the K_{D} value of the CH3 domains of human IgG4 is 4.8×10⁻⁸ M, so that the interaction between the CH3 domains of human IgG4 is about 6 to 7 times weaker than that of human IgG1.

[1324] Further, it has been reported that by substituting R409 in the CH3 domain of human IgG4 with K of human IgG1, the interaction between the CH3 domains is enhanced (Structure 2011 19: 9: 1274-1282).

[1325] In addition, there has also been a report that an amino acid site important for the interaction between the CH3 domains of human IgG1 was identified based on changes in free energy by substituting an amino acid in the CH3 domain of human IgG1 with Ala (Biochemistry 1998: 37: 9266-9273). From this, the interaction between the CH3 domains of human IgG1 can be attenuated by adding a known amino acid alteration to the CH3 domain of human IgG1.

[1326] Therefore, it was verified whether the ADCC activity is exhibited specifically for the double-positive cell by adding an amino acid alteration to the CH3 domain of human IgG1 so as to attenuate the interaction between the CH3 domains of human IgG1.

[1327] An anti-CD4 antibody (J. Immunol. 1992; 149; 1779-1787) and an anti-CD70 antibody (WO 2007/03637), in which the interaction between the CH 3 domains of IgG1 was attenuated were produced according to the following procedure.

[1328] A subclass from which each domain of various types of designed anti-CD4 and anti-CD70 half-molecules is derived, and the correspondence of the ammo acid sequence of the H chain constant region are shown in Table 17. When a human IgG1 type has an H chain constant region constituted by an amino acid sequence in which C266A/C229A: AA was introduced as an amino acid alteration for cutting the disulfide bond between the H chains in the hinge domain, S239D/I332E; DE was introduced as an. amino acid alteration for enhancing the ADCC activity, D265A was introduced as a CD16a-binding asymmetric amino acid alteration, and a K409R alteration was introduced as an amino acid alteration for attenuating the inter-CH3 domain interaction, it is referred to as “IgG1_AA_DE265A_K409R”.

TABLE 17

| | | SEQ ID NO | SEQ ID NO |
|---|---|---|---|
| Purified antibody name (Inter-CH3 | | of base | of amino acid |
| domain interaction attenurating alteration) | Structure of CH of antibody | sequence | sequence |
| anti-CCD4 antibody half-molecule (K409R) | IgG1_AA_DE_P329Y_K409R CH | 205 | 206 |
| anti-CCD4 antibody half-molecule (Y349A) | IgG1_AA_DE_D265A_Y349A CH | 207 | 208 |
| anti-CCD4 antibody half-molecule (L351A) | IgG1_AA_DE_D265A_L351A CH | 209 | 210 |
| anti-CCD4 antibody half-molecule (T366A) | IgG1_AA_DE_D265A_T366A CH | 211 | 212 |
| anti-CCD4 antibody half-molecule (L368A) | IgG1_AA_DE_D265A_L368A CH | 213 | 214 |
| anti-CCD4 antibody half-molecule (D399A) | IgG1_AA_DE_D265A_D399A CH | 215 | 216 |
| anti-CCD4 antibody half-molecule (F405A) | IgG1_AA_DE_D265A_F405A CH | 217 | 218 |
| anti-CCD4 antibody half-molecule (Y407A) | IgG1_AA_DE_D265A_Y407A CH | 219 | 220 |
| anti-CCD4 antibody half-molecule (K409A) | IgG1_AA_DE_D265A_K409A CH | 221 | 222 |
| anti-CCD70 antibody half-molecule (K409R) | IgG1_AA_DE_P329Y_K409R CH | 223 | 224 |
| anti-CCD70 antibody half-molecule (Y349A) | IgG1_AA_DE_P329Y_Y349A CH | 225 | 226 |
| anti-CCD70 antibody half-molecule (L361A) | IgG1_AA_DE_P329Y_L351A CH | 227 | 228 |
| anti-CCD70 antibody half-molecule (T366A) | IgG1_AA_DE_P329Y_T366A CH | 229 | 230 |
| anti-CCD70 antibody half-molecule (L368A) | IgG1_AA_DE_P329Y_L366A CH | 231 | 232 |
| anti-CCD70 antibody half-molecule (D399A) | IgG1_AA_DE_P329Y_D399A CH | 233 | 234 |
| anti-CCD70 antibody half-molecule (F405A) | IgG1_AA_DE_P329Y_F405A CH | 235 | 236 |
| anti-CCD70 antibody half-molecule (Y407A) | IgG1_AA_DE_P329Y_Y407A CH | 237 | 238 |
| anti-CCD70 antibody half-molecule (K409A) | IgG1_AA_DE_P329Y_K409A CH | 239 | 240 |

[1329] (1) Production of Expression Vector for Anti-CD4 Antibody Half-Molecule and Anti-CD70 Antibody Half-Molecule

[1330] A DNA fragment of about 9 kbp was cut out using restriction enzymes NheI and NotI from a human IgG1 anti-CD4 antibody expression vector pCI-IgG1_CD4 (ibalizumab) (SEQ ID NOS: 5, 7 41, and 43) or a human IgG1 anti-CD70 antibody expression vector pCI-IgG1_CD70 (2H5) (SEQ ID NOS: 5, 7, 45 and 47), and purified.

[1331] A ligation reaction of the purified DNA fragment with an artificial synthetic gene composed of the CH1 domain, the hinge domain (to which a C226A/C229A alteration was added), the CH2 domain (to which a S239D/I332E alteration and a D265A or P329Y alteration were added), and the CH3 domain to which an amino acid alteration for attenuating the CH3 domain interaction was added) of a human IgG1 antibody was carried out using In-Fusion HD Cloning Kit (Clontech), and Escherichia coli DH5α competent cells (Takara Bio) were transformed using the reaction solution. Each plasmid DNA was prepared from the obtained transformant the base sequence of the DNA was analyzed by Fasmac.

[1332] (2)Expression of Anti-CD4 Antibody Half-Molecule and Anti-CD70 Antibody Half-Molecule

[1333] The expression vector produced in (1) was introduced into a host cell in the same manner as in Example 5.

[1334] (3) Purification of Anti-CD4 Antibody Half-Molecule and Anti-CD70 Antibody Half-Molecule

[1335] The altered antibody was purified in the same manner as in Example 5.

[1336] (4) Evaluation of Purification Degree by SDS-PAGE Anti-CD4 Antibody Half-Molecule and Anti-CD70 Antibody Half-Molecule

[1337] As a result of evaluating the purification degree of the prepared various types of antibody samples in the same manner as in Example 5, in all the purified antibodies, under reducing conditions, a band was observed in the vicinity of about 50 kDa for the H chain and in the vicinity of about 25 kDa for the L chain. Further, under non-reducing conditions, a band was observed in the vicinity of about 150 kDa for the anti-CD4 IgG1 antibody and the anti-CD70 IgG1 antibody and in the vicinity of about 75 kDa for the anti-CD4 half-molecule and the anti-CD70 half-molecule, and therefore, it was confirmed that the produced anti-CD4 and anti-CD70 IgG1 antibodies are each an antibody structure constituted by the target H chain and L chain, and the anti-CD4 antibody half-molecule and the anti-C70 antibody half-molecule are each constituted by the target H chain and L chain, and have an antibody structure that easily forms a half-molecule.

[1338] (5) ADCC Activity of Anti-CD4 IgG1 Antibody and Anti-CD70 IgG1 Antibody, and Half-Molecules of These Antibodies Against CD4/CD70 Double-Positive Cell and CD4 and CD 70 Single-Positive Cells

[1339] The ADCC activity of an antibody composition obtained by mixing the anti-CD4 antibody half-molecule and the anti-CD70 antibody half-molecule to which an amino acid alteration for attenuating the interaction between CH3 domains was added was evaluated in the same manner as in Example 5. As the control antibody, the anti-CD4 IgG1 antibody and the anti-CD70 IgG1 antibody were used.

[1340] As shown in FIGS. 16A and 16B, in the antibody solution obtained by mixing the anti-CD4 antibody half-molecule and the anti-CD 70 antibody half-molecule to which an amino acid alteration for attenuating the interaction between the CH3 domains of human IgG1 was added, the ADCC activity against the CD4/CD70 double-positive cell is stronger as compared with the ADCC activity against the CD4 and CD70 single-positive cells, and it was shown that it is specific for the CD4/CD70 double-positive cell.

### Example 7

[1341] Kinetic Test in Mouse and Measurement of Thermal Stability of CH2 Domain

[1342] (Kinetic Test in Mouse)

[1343] A kinetic test for an antibody composition obtained by combining the CD16a-binding asymmetric alteration (D265A or P329Y) obtained Examples 1 to 3, any of various types of CD16a-binding enhancing alterations obtained in Example 5, and the amino acid alteration (K409R) for attenuating the interaction between the CH3 domains of human IgG1 obtained in Example 6 was carried out. As the variable region, a DNA fragment encoding an altered region of an anti-2,4-dinitrophenol (DNP) IgG1 antibody (clone name: DNP2) described in Clin Cancer Res. 11(8): 3126-3135, 2005 which does not react with a specific protein was used. The base sequences and the amino acid sequences of the VH and VL of the anti-DNP antibody are shown in Table 18. Further, the base sequences and the amino acid sequences of anti-DNP antibody half-molecules 1 to 6 used for evaluation are shown in Table 19.

TABLE 18

| | SEQ ID NO of | SEQ ID NO of |
|---|---|---|
| Sequence name | base sequence | amino acid sequence |
| Anti-DNP antibody VH | 241 | 242 |
| Anti-DNP antibody VL | 243 | 244 |

TABLE 19

| | | SEQ ID NO of | SEQ ID NO of |
|---|---|---|---|
| Purified antibody | Structure of CH of antibody | base sequence | amino acid sequence |
| anti-DNP antibody half-molecule 1 | IgG1_AA_AAA/S239D_D265A_K409R CH | 245 | 246 |
| anti-DNP antibody half-molecule 2 | IgG1_AA_S239D/I332E_D236A_K409R CH | 205 | 206 |
| anti-DNP antibody half-molecule 3 | IgG1_AA_S239D/K326T_D265A_K409R CH | 247 | 248 |
| anti-DNP antibody half-molecule 4 | IgG1_AA_AAA/S239D_P329Y_K409R CH | 249 | 250 |
| anti-DNP antibody half-molecule 5 | IgG1_AA_S239D/I332E_P329Y_K409R CH | 223 | 224 |
| anti-DNP antibody half-molecule 6 | IgG1_AA_S239D/K326T_P329Y_K409R CH | 251 | 252 |

[1344] The anti-DNP IgG1 antibody and the anti-DNP antibody half-molecules were produced by the same method as described in Example 6. In all the purified antibodies, under reducing conditions, a band was observed in the vicinity of about 50 kDa for the H chain and in the vicinity of about 25 kDa for the L chain. Further, under non-reducing conditions, a band was observed in the vicinity of about 150 kDa for the anti-DNP antibody, and in the vicinity a about 75 kDa for the anti-DNP antibody half-molecule, and therefore, it was confirmed that the produced anti-DNP antibody is an antibody structure constituted by the target H chain and L chain, and the anti-DNP antibody half-molecule is constituted by the target H chain and L chain, and has an antibody structure that easily forms a half-molecule.

[1345] The antibody compositions of the present invention were prepared by mixing the half-molecules 1 and 4, or the half-molecules 2 and 5, or the half-molecules 3 and 6 of the anti-DNP antibody, respectively. After the antibody composition (1 mg/kg) was administered to a BALB/c mouse through the tail vein, the blood was collected after 1 hour, 4 hours, 24 hours, and 72 hours. After piercing the cheek with a lancet under isoflurane anesthesia and collecting the blood, serum was recovered by centrifuging the blood at 8,000 rpm at room temperature for 10 minutes with Microtainer (registered trademark) (BD).

[1346] As the amount of the antibody present in the serum, the concentration of the antibody in the serum was measured using AlphaLISA Human Kappa light chain immunoassay kit (AL3023, PerkinElmer). A calibration curve was drawn with Kappa light chain in the kit. The results are shown in FIG. 17.

[1347] As shown in FIG. 17, it was found that the antibody composition of the present invention exhibits various kinetics depending on the difference in the CD16a-binding enhancing amino acid alteration. Above all, it was found that the antibody composition of the present invention having S239D/K326T exhibits kinetics close to that of the anti-DNP IgG1 antibody.

[1348] (Measurement of Tm Value of CH2 Domain)

[1349] In order to study the affect of various CD16a-binding enhancing amino acid alterations introduced into the half-molecule on the thermal stability of the CH2 domain, the Tm value was measured by differential scanning fluorimetry (DSF). The anti-CD4 antibody half-molecules and the and-CD70 antibody half-molecules shown in Table 20 into which a CD16a-binding enhancing amino acid alteration was introduced were prepared in the same manner as in [Example 6]. The Tm values of the CH2 domains of the prepared anti-CD4 antibody half-molecules and anti-CD70 antibody half-molecules were measured under the condition of temperature elevation rate of 1° C./min from 20° C. to 95° C. using Prometheus NT.48 manufactured by NanoTemper Technologies GmbH.

TABLE 20

| Purified antibody name | | Tm | SEQ ID NO | SEQ ID NO |
|---|---|---|---|---|
| (CD16a-binding enhancing | | value | of base | of amino acid |
| amino acid alteration) | Structure of CH of antibody | ( [symbol] ) | sequence | sequence |
| anti-CD4 antibody half-molecule | IgG1_AA_AAA/S239D_D265A_K409R CH | 47.4 | 245 | 246 |
| (AA/S239D) | | | | |
| anti-CD4 antibody half-molecule | IgG1_AA_S239D/I332E_D265A_K409R CH | 42.5 | 205 | 206 |
| (S239D/I332E) | | | | |
| anti-CD4 antibody half-molecule | IgG1_AA_S239D/K326T_D265A/K409R CH | 56.8 | 247 | 248 |
| (S239D/K326T) | | | | |
| anti-CD4 antibody half-molecule | IgG1_AA_S239D/S298A/E333A/L242C/ | 66.2 | 271 | 272 |
| (S239D/S296A/E333A/L242C/K334C) | K334C_D265A_K409R CH | | | |
| anti-CD4 antibody half-molecule | IgG1_AA_AAA/S239D_P329Y_K409R CH | 48.5 | 249 | 250 |
| (AAA/S239D) | | | | |
| anti-CD4 antibody half-molecule | IgG1_AA_S239D/I332E_P329Y_K409R CH | 44.4 | 223 | 224 |
| (S239D/I332E) | | | | |
| anti-CD4 antibody half-molecule | IgG1_AA_S239D/K326T_P329Y_K409R CH | 57.0 | 251 | 252 |
| (S239D/K326T) | | | | |
| anti-CD4 antibody half-molecule | IgG1_AA_S239D/S298A/E333A/L242C/ | 65.5 | 291 | 292 |
| (S239D/S298A/E333A/L242C/K334C) | K334C_P329Y_K409R CH | | | |

[symbol]

indicates data missing or illegible when filed

[1350] When considering the results of the PK test in mouse shown in FIG. 17 together with the Tm values in Table 20, the higher the Tm value of the CH2 domain with the CD16a binding enhancing amino acid alteration is, the longer the half-life tends to be. From this, it was found that by measuring the Tm value, the antibody composition of the present invention having a favorable blood half-life can be selected.

### Example 8

[1351] An evaluation system that mimics the internal human be was constructed by adding Venoglobulin (Japan Blood Products Orgainzation, #867279694) at a final concentration of 8 mass % to the ADCC evaluation system described in Example 1 (5). The antibody compositions evaluated are shown in Table 21.

TABLE 21

| | | SEQ ID NO | SEQ ID NO |
|---|---|---|---|
| Purified antibody name | | of base | of amino acid |
| (CD16a-binding enhancing amino acid alteration) | Structure of CH of antibody | sequence | sequence |
| anti-CD4 antibody half-molecule (S239D/I332E) | IgG1_AA_S239D/I332E_D265A_K409R CH | 205 | 206 |
| anti-CD4 antibody half-molecule (S239D/K326E) | IgG1_AA_S239D/K326E_D266A_K409R CH | 253 | 254 |
| anti-CD4 antibody half-molecule (S239D/K326I) | IgG1_AA_S239D/K326I_D265A_K409R CH | 255 | 256 |
| anti-CD4 antibody half-molecule (AAA/H268E) | IgG1_AA_AAA/H268E_D265A_K409R CH | 257 | 258 |
| anti-CD4 antibody half-molecule | IgG1_AA_S298A/E333A/ | 259 | 260 |
| (S298A/E333A/K334E) | K334E_D265A_K409R CH | | |
| anti-CD4 antibody half-molecule (AAA/S239D) | IgG1_AA_AAA/S239D_D265A_K409R CH | 245 | 246 |
| anti-CD4 antibody half-molecule (S239D/K325T) | IgG1_AA_S239D/K326T_D265A_K409R CH | 247 | 248 |
| anti-CD4 antibody half-molecule (S239E/I332E) | IgG1_AA_S239E/I332E_D265A_K409R CH | 261 | 262 |
| anti-CD4 antibody half-molecule (S239D/I332T) | IgG1_AA_S239D/I332T_D265A_K409R CH | 263 | 264 |
| anti-CD4 antibody half-molecule (S239D/A330F) | IgG1_AA_S239D/A330F_D265A_K409R CH | 265 | 266 |
| anti-CD4 antibody half-molecule (S239D) | IgG1_AA_S239D_D265A_K409R CH | 267 | 268 |
| anti-CD4 antibody half-molecule | IgG1_AA_AAA/S239D/ | 269 | 270 |
| (AAA/S239D/L309K) | L309K_D265A_K409R CH | | |
| anti-CD4 antibody half-molecule | IgG1_AA_S239D/S298A/E33A/L242C/ | 271 | 272 |
| (S239D/S298A/E333A/L242C/K334C) | K334C_D265A_K409R CH | | |
| anti-CD70 antibody half-molecule (S239D/I332E) | IgG1_AA_S239D/I332E_P329Y_K409R CH | 223 | 224 |
| anti-CD70 antibody half-molecule (S239D/K326E) | IgG1_AA_S239D/K326E_P329Y_K409R CH | 273 | 274 |
| anti-CD70 antibody half-molecule (S230D/K326I) | IgG1_AA_S239D/K326I_P329Y_K409R CH | 275 | 276 |
| anti-CD70 antibody half-molecule (AAA/H268E) | IgG1_AA_AAA/H268E_P329Y_K409R CH | 277 | 278 |
| anti-CD70 antibody half-molecule | IgG1_AA_S298A/E333A/ | 279 | 280 |
| (S298A/E333A/K334E) | K334E_P329Y_K409R CH | | |
| anti-CD70 antibody half-molecule (AAA/S239D) | IgG1_AA_S239D_P329Y_K409R CH | 249 | 250 |
| anti-CD70 antibody half-molecule (S239D/K326T) | IgG1_AA_S239D/K326T_P329Y_K409R CH | 251 | 252 |
| anti-CD70 antibody half-molecule (S239E/I332E) | IgG1_AA_S239E/I332E_P329Y_K409R CH | 281 | 282 |
| anti-CD70 antibody half-molecule (S239D/I332T) | IgG1_AA_S239D/I332T_P329Y_K409R CH | 283 | 284 |
| anti-CD70 antibody half-molecule (S239D/D330F) | IgG1_AA_S239D/D330F_P329Y_K409R CH | 285 | 286 |
| anti-CD70 antibody half-molecule (S239D) | IgG1_AA_S239D_P329Y_K409R CH | 287 | 288 |
| anti-CD70 antibody half-molecule | IgG1_AA_S239D/L309K_P329Y_K409R CH | 289 | 290 |
| (AAA/S239D/L309K) | | | |
| anti-CD70 antibody half-molecule | IgG1_AA_S239D/S298A/E333A/L242C/ | 291 | 292 |
| (S239D/S298A/E333A/L242C/K334C) | K334C_P329Y_K409R CH | | |

[1352] The anti-CD4 antibody half-molecule and the anti-CD70 antibody half-molecule were prepared in the same manner as in [Example 6]. As the VH and VL of the anti-CD4 antibody and the VH and VL of the anti-CD 70 antibody, those shown in Table 11 were used.

[1353] The ADCC activity of the antibody composition obtained by mixing the anti-CD4 antibody half-molecule and the anti-70 antibody half-molecule was evaluated in the same manner as in Example 5. As the positive control antibody, the anti-CD4 IgG1 antibody and the anti-CD70 IgG1 antibody were used.

[1354] As shown in FIGS. 18A to 18C, it was confirmed that the antibody composition of the present invention exhibits the ADCC activity specific for the CD4/CD70 double-positive cell even in the presence of Venoglobulin.

### Example 9

[1355] ADCC Activity in Human Blood Reconstitution System

[1356] Whether a double-positive cell can be specifically removed was studied using an evaluation system containing a human blood component brought closer to the state of the internal human body. The evaluation target antibodies are shown in Table 22.

TABLE 22

| Purified antibody name | | SEQ ID NO | SEQ ID NO |
|---|---|---|---|
| (CD16a-binding enhancing | | of base | of amino acid |
| amino acid alteration) | Structure of CH of antibody | sequence | sequence |
| anti-CD4 antibody half-molecule | IgG1_AA_AAA/S239D_D265A_K409R CH | 245 | 246 |
| (AAA/S239D) | | | |
| anti-CD4 antibody half-molecule | IgG1_AA_S239D/I332E_D265A_K409R CH | 205 | 306 |
| (S239D/I332E) | | | |
| anti-CD4 antibody half-molecule | IgG1_AA_S239D/K326T_D265A_K409R CH | 247 | 248 |
| (S239D/K326T) | | | |
| anti-CD4 antibody half-molecule | IgG1_AA_AAA/S239D_P329Y_K409R CH | 249 | 250 |
| (AAA/S239D) | | | |
| anti-CD4 antibody half-molecule | IgG1_AA_S239D/I332E_P329Y_K409R CH | 223 | 224 |
| (S239D/I332E) | | | |
| anti-CD4 antibody half-molecule | IgG1_AA_S239D/K326T_P329Y_K409R CH | 251 | 252 |
| (S239D/K326T) | | | |

[1357] (1) Production of Expression Vector for Anti-CD4 Antibody Half-Molecule and Anti-CCR3 Antibody Half-Molecule

[1358] A vector was produced in the same manner as in Example 5 (1).

[1359] (2) Expression of Anti-CD4 IgG1 Antibody and Anti-CCR6IgG1 Antibody (KG1684) and Half-Molecules of These Antibodies

[1360] The antibodies were expressed in the same manner as in Example 5 (2).

[1361] (3) Purification of Anti-CD4 Antibody Half-Molecule and Anti-CCR6 Antibody Half-Molecule

[1362] The antibodies were purified in the same manner as in Example 5 (3).

[1363] (4) Evaluation of Purification Degree of Anti-CD4 Antibody Half-Molecule and Anti-CCR6 Antibody Half Molecule

[1364] As a result of evaluating the purification degree of each antibody in the same manner as in Example 5 (4), in will the purified antibodies, under reducing conditions, a band was observed in the vicinity of about 50 kDa for the H chain and in the vicinity of about 25 kDa or the L chain. Further, under non-reducing conditions, a band was observed in the vicinity of about 150 kDa for the anti-CD4 IgG1 antibody and the anti-CCR6 IgG1 antibody, and in the vicinity of about 75 kDa for the anti-CD4 antibody half-molecule and the anti-CCR6 antibody half-molecule, and therefore, it was confirmed that the produced anti-CD4 IgG1 antibody and anti-CCR6 IgG1 antibody are each an antibody structure constituted by the target H chain and L chain, and the anti-CD4 antibody half-molecule and the anti-CCR6 antibody half-molecule are each constituted by the target H chain and L chain, and have an antibody structure that easily form a a half-molecule.

[1365] (5) ADCC Activity of Antibody Composition Obtained by Mixing Anti-CD4 Antibody Half-Molecule and Anti-CCR6 Antibody Half-Molecule Against CD4/CCR6 Double-Positive Cell

[1366] In 50 mL of human blood, a 20 mL portion was used for plasma and a 30 mL portion was used for collecting a fraction of peripheral blood mononuclear cells and granulocytes. In order to obtain plasma, the blood was centrifuged at 2000 rpm for 20 minutes at 4° C. in a 15 mL centrifuge tube, and the supernatant was recovered.

[1367] It order to collect the fraction of peripheral blood mononuclear cells and granulocytes, with respect to 10 mL of the blood, 2 mL of Hetasep (Stemcell technology, #07806) was added and mixed well, and then, the mixture was centrifuged at 50×g for 1 minute at room temperature. The mixture was left to stand at room temperature until it is separated, and a layer other than red blood cells was recovered and the volume was made up to 50 mL with PBS and the resultant was centrifuged at 540×g for 5 minutes.

[1368] The recovered plasma and the fraction of peripheral blood mononuclear cells and granulocytes were mixed and prepared at 5×10⁶ cells/mL and seeded at 5×10⁵ cells/100 μL/well, and then, 20 μL of the antibody composition obtained by mixing the anti-CD4 antibody half-molecule and the anti-CCR6 antibody half-molecule and 80 μL of the plasma were added thereto, and the cells were cultured at 37° C. for 24 hours. The ratio of the CD4/CCR6 double-positive cell per CD3-positive T cell was measured by flow cytometry. As the negative control, the anti-DNP antibody used in Example 7 was used.

[1369] As shown in FIG. 19A, it was found that all the antibody compositions of the present invention remove the CD4/CCR6 double-positive cell in an antibody concentration-dependent manner, but do net remove the CD4 or CCR6 single-positive cell.

### Example 9-2

[1370] Whether a double-positive cell can be specifically removed was studied using the antibody composition of the present invention having an amine acid alteration different from those in [Example 9]. The evaluation target antibodies are shown in Table 23.

TABLE 23

| Antibody | | | SEQ ID NO | SEQ ID NO |
|---|---|---|---|---|
| composition | Purified antibody name (CD16a-binding | | of base | of amino acid |
| name | enhancing amino acid alteration) | Structure of CH of antibody | sequence | sequence |
| A | anti-CD4 antibody half-molecule | IgG1_AA_S239D/S298A/E333A/L242C/ | 271 | 272 |
| | (S239D/S298A/E333A/L242C/K334C) | K334C_D265A_K409R CH | | |
| | anti-CCR6 antibody half-molecule | IgG1_AA_S239D/S298A/E333A/L242C/ | 291 | 292 |
| | (S239D/S298A/E333A/L242C/K334C) | K334C_P320Y_K409R CH | | |
| B | anti-CD4 antibody half-molecule | IgG1_AA_S239D/K326T_S298E_K409R CH | 293 | 294 |
| | (S239D/K326T) | | | |
| | anti-CCR6 antibody half-molecule | IgG1_AA_S239D/K326T_P329Y_K409R CH | 251 | 252 |
| | (S239D/K326T) | | | |
| C | anti-CD4 antibody half-molecule | IgG1_AA_AAA/S239D_S298E_K409R CH | 295 | 296 |
| | (AAA/S239D) | | | |
| | anti-CCR6 antibody half-molecule | IgG1_AA_AAA/S239D_P329Y_K409R CH | 249 | 250 |
| | (AAA/S239D) | | | |
| D | anti-CD4 antibody half-molecule | IgG1_AA_S239D/E333A/L242C/ | 297 | 298 |
| | (S239D/E333A/L242C/K334C) | K334C_S298E_K409R CH | | |
| | anti-CCR6 antibody half-molecule | IgG1_AA_S239D/S298A/E333A/L242C/ | 291 | 292 |
| | (S239D/S298A/E333A/L242C/K334C) | K334C_P329Y_K409R CH | | |

[1371] Preparation of the evaluation target antibodies and evaluation were carried out in the same manner as in [Example 9].

[1372] As shown in FIG. 19B, it was found that all the antibody compositions of the present invention remove the CD4/CCR6 double-positive cell in an antibody concentration-dependent manner, but do not remove the CD4 or CCR6 single-positive cell.

### Example 10

[1373] ADCC Activity When Antigen-Binding Domains of First IgG Half-Molecule and Second IgG Half-Molecule were Exchanged

[1374] The effect on the ADCC activity when the antigen-binding domains of the first IgG half-molecule and the second IgG half-molecule were exchanged was studied. The evaluation target antibodies are shown in Table 24.

TABLE 24

| | | SEQ ID NO | SEQ ID NO |
|---|---|---|---|
| Purified antibody name (CD16a-binding | | of base | of amino acid |
| enhancing amino acid alteration) | Structure of CH of antibody | sequence | sequence |
| andti-CD4 antibody half-molecule A | IgG1_AA_S239D/K326T_D265A_K409R CH | 247 | 248 |
| (S239D/K326T) | | | |
| andti-CCR4 antibody half-molecule A | IgG1_AA_S239D/K326T_P329Y_K409R CH | 251 | 252 |
| (S239D/K326T) | | | |
| andti-CD4 antibody half-molecule B | IgG1_AA_S239D/K326T_P329Y_K409R CH | 251 | 252 |
| (S239D/K326T) | | | |
| andti-CCR4 antibody half-molecule B | IgG1_AA_S239D/K326T_D265A_K409R CH | 247 | 248 |
| (S239D/K326T) | | | |
| andti-CD4 antibody half-molecule C | IgG1_AA_S239D/S298A/E333A/L242C/ | 271 | 272 |
| (S239D/S298A/E333A/L242C/K334C) | K334C_D265A_K409R CH | | |
| andti-CCR4 antibody half-molecule C | IgG1_AA_S239D/S298A/E333A/L242C/ | 291 | 292 |
| (S239D/S298A/E333A/L242C/K334C) | K334C_P329Y_K409R CH | | |
| andti-CD4 antibody half-molecule D | IgG1_AA_S239D/S298A/E333A/L242C/ | 291 | 292 |
| (S239D/S298A/E333A/L242C/K334C) | K334C_P329Y_K409R CH | | |
| andti-CCR4 antibody half-molecule D | IgG1_AA_S239D/S298A/E333A/L242C/ | 271 | 272 |
| (S239D/S298A/E333A/L242C/K334C) | K334C_D265A_K409R CH | | |

[1375] The anti-CD4 antibody half-molecule and the anti-CCR4 antibody half-molecule, and as the positive control, an anti-CD4 IgG1 antibody and an anti-CCR4 IgG1 antibody were prepared in the same manner in [Example 5] and [Example 6]. As the VH and VL of the anti-CD4 antibody, those shown in Table 11 were used, and as the VH and VL of the anti-CCR4 antibody, those shown in Table 14 were used.

[1376] Antibody solutions were prepared by mixing equal amounts of each of the half-molecules A to D of the anti-CD4 antibody and each of the half-molecules A to D of the anti-CCR4 antibody to give a concentration of 1.0 μg/mL. The results of measuring the ADCC activity of each antibody solution against a CD4/CCR4 double-positive cell (TL-Om1), a CCR 4 single-positive cell (MT-1), and a CD4 single-positive cell (CD4/EL4) are shown in FIG. 20.

[1377] As shown in FIG. 20, it was confirmed that all the antibody compositions obtained by mixing the half-molecules A to D exhibit the ADCC activity specific for the CD4/CCR4 double-positive cell. That is, it was shown that the specific ADCC activity is exhibited even when the antigen-binding domains of the first IgG half-molecule and the second IgG half-molecule were exchanged.

### Example 10-2

[1378] The effect on the ADCC activity when the antigen-binding domains of the first IgG half-molecule and the second IgG half-molecule were exchanged was studied using the antibody composition of the present invention having an amino acid alteration different from those in [Example 10]. The evaluation target antibodies are shown in Table 25.

TABLE 25

| | | SEQ ID NO | SEQ ID NO |
|---|---|---|---|
| Purified antibody name (CD16a-binding | | of base | of amino acid |
| enhancing amino acid alteration) | Structure of CH of antibody | sequence | sequence |
| anti-CD4 antibody half-molecule E | IgG1_AA_S239D/K326T_S298E_K409R CH | 293 | 294 |
| (S239D/K326T) | | | |
| anti-CCR4 antibody half-molecule E | IgG1_AA_S239D/K326T_P329Y_K409R CH | 251 | 252 |
| (S239E/K326T) | | | |
| anti-CD4 antibody half-molecule F | IgG1_AA_S239D/K326T_P329Y_K409R CH | 251 | 252 |
| (S239D/K326T) | | | |
| anti-CCR4 antibody half-molecule F | IgG1_AA_S239D/K326T_S298E_K409R CH | 293 | 294 |
| (S239D/K326T) | | | |
| anti-CD4 antibody half-molecule G | IgG1_AA_S239D/E333A/L242C/ | 297 | 298 |
| (S239D/E333A/L242C/K334C) | K334C_S298E_K409R CH | | |
| anti-CCR4 antibody half-molecule G | IgG1_AA_S239D/S298A/E333A/L242C/ | 291 | 292 |
| (S239D/S298A/E333A/L242C/K334C) | K334C_P329Y_K409R CH | | |
| anti-CD4 antibody half-molecule H | IgG1_AA_S239D/S298A/E333A/L242C/ | 291 | 292 |
| (S239D/S298A/E333A/L242C/K334C) | K334C_P329Y_K409R CH | | |
| anti-CCR4 antibody half-molecule H | IgG1_AA_S239D/E333A/L242C/ | 297 | 298 |
| (S239D/E333A/L242C/K334C) | K334C_S298E_K409R CH | | |

[1379] The anti-CD4 antibody half-molecule and the anti-CCR4 antibody half-molecule, and as the positive control, an anti-CD4 IgG1 antibody and an anti-CCR4 IgG1 antibody were prepared in the same manner as in [Example 5] and [Example 6]. As the VH and VL of the anti-CD4 antibody, those shown in Table 11 were used, and as the VH and VL of the anti-CCR4 antibody, those shown in Table 14 were used.

[1380] Antibody solutions were prepared by mixing equal amounts of each of the half-molecules E to F of the anti-CD4 antibody and each of the half-molecules E to F of the anti-CCR4 antibody to give a concentration of 0.1 μg/mL. The results of measuring the ADCC activity of each antibody solution against a CD4/CCR4 double-positive cell (HH), a CCR4 single-positive cell (L428), and a CD4 single-positive cell (TALL1) are shown in FIG. 21.

[1381] As shown in FIG. 21, it was confirmed that all the antibody compositions obtained by mixing the half-molecules A to D exhibit the ADCC activity specific for the CD4/CCR4 double-positive cell. That is, it was shown that the specific ADCC activity is exhibited even when the antigen-binding domains of the first IgG half-molecule and the second IgG half-molecule were exchanged.

### Example 11

[1382] Whether the antibody composition of the present invention exhibits an ADCC activity specific only for a double-positive cell also in a combination of different antigens (CCR4 and CD70) was studied. The evaluation target antibodies are shown in Table 26.

TABLE 26

| Antibody | | | SEQ ID NO | SEQ ID NO |
|---|---|---|---|---|
| composition | Purified antibody name (CD16a-binding | | of base | of amino acid |
| name | enhancing amino acid alteration) | Structure of CH of antibody | sequence | sequence |
| E | anti-CCR4 antibody half-molecule | IgG1_AA_S239D/K326T_D265A_K409R CH | 247 | 248 |
| | (S239D/K326T) | | | |
| | anti-CD70 antibody half-molecule | IgG1_AA_S239D/K326T_P329Y_K409R CH | 251 | 252 |
| | (S239D/K326T) | | | |
| F | anti-CCR4 antibody half-molecule | IgG1_AA_S239D/S298A/E333A/L242C/ | 27 | 272 |
| | (S239D/E333A/L242C/K334C) | K334C_D265A/K409R CH | | |
| | anti-CD70 antibody half-molecule | IgG1_AA_S239D/S298A/E333A/L242C/ | 291 | 292 |
| | (S239D/S298A/E333A/L242C/K334C) | K334C_P329Y_K409R CH | | |
| G | anti-CCR4 antibody half-molecule | IgG1_AA_S239D/K326T/S298E_K409R CH | 293 | 294 |
| | (S239D/K326T) | | | |
| | anti-CD70 antibody half-molecule | IgG1_AA_S329D/K326T_P329Y_K409R CH | 251 | 252 |
| | (S239D/K326T) | | | |
| H | anti-CCR4 antibody half-molecule | IgG1_AA_S239D/E333A/L242C/ | 297 | 298 |
| | (S239D/E333A/L242C/K334C) | K334C_S298E_K409R CH | | |
| | anti-CD70 antibody half-molecule | IgG1_AA_S239D/S298A/E333A/L242C/ | 291 | 292 |
| | (S239D/S298A/E333A/L242C/K334C) | K334C_P329Y_K409R CH | | |

[1383] The anti-CCR4 antibody half-molecule and the anti-CD70 antibody half-molecule, and as the positive control, an anti-CCR4 IgG1 antibody and an anti-CD 70 IgG1 antibody were prepared in the same manner as in [Example 5] and [Example 6]. As the base sequences and the amino acid sequences of the VH and VL of the anti-CCR4 antibody, those shown in Table 14 were used, and as the base sequences and the amino acid sequences of the VH and VL of the anti-CD70 antibody, those shown in Table 11 were used.

[1384] Antibody solutions were prepared thy mixing equal amounts of each of the half-molecules A to D of the anti-CCR4 antibody and each of the half-molecules A to D of the anti-CD70 antibody to a concentration of 0.1 μg/mL. The results of measuring the ADCC activity of each antibody solution against a CCR4/CD70 double-positive cell (L428), a CCR4 single-positive cell (PEER), and a CD70 single-positive cell (SUP-M2) are shown in FIG. 22.

[1385] As shown in FIG. 22, it was confirmed that all the antibody compositions obtained by mixing the half-molecules A to D exhibit the ADCC activity specific for the CCR4/CD70 double-positive cell.

### Example 12

[1386] CD16a Binding Analysis

[1387] It was verified that an antibody composition binds to CD16a only when it is the antibody composition of the first IgG half-molecule and the second IgG half-molecule of the present invention.

[1388] As the evaluation target antibodies, the following antibodies were used.
[1389] the anti-DNP antibody half-molecule 3 (265A) described in [Example 7]
[1390] the anti-DNP antibody half-molecule 6 (329Y) described in [Example 7]
[1391] the antibody composition (265A+329Y) obtained by mixing the anti-DNP antibody half-molecules 3 and 6 described in [Example 7]
[1392] the anti-DNP antibody (positive control) described in [Example 7]

[1393] In the measurement, BIAcore (manufactured by Biacore, Inc) was used, and the measurement method was performed by the following method according to the description in J. Immunol. Methods, 200, 121 (1997).

[1394] By using BIAcore T100 (manufactured by Biacore Inc.), an interaction analysis between each evaluation target antibody and CD16a was performed. As a running buffer, HBS-EP+10× (GE Healthcare) was diluted to 1/10 and used, and the measurement temperature was set to 25° C. A chip in which immobilization was carried out on Series S Sensor Chip CM5 (GE Healthcare) with Human Fab Capture Kit (GE Healthcare) was used.

[1395] The intended evaluation target antibody was captured on this sensor chip, and CD16a diluted with the running buffer was allowed to interact therewith, and the measurement was performed. Further, the evaluation target antibody captured onto the sensor chip was washed by allowing the buffer attached to the human Fab Capture Kit (GE Healthcare) to react therewith, so that the sensor chip was regenerated and used repeatedly. The measurement results are shown in FIG. 23.

[1396] As shown in FIG. 23, in the case of the anti-DNP antibody half-molecule 3 (265A) alone and the anti-DNP antibody half-molecule 6 (329Y) alone, the binding activity to CD16a was not observed, and only in the case of the antibody composition of the ant-DNP antibody half-molecule 3 (265A) and the anti-DNP antibody half-molecule 6 (329Y), the binding activity to CD16a was observed.

[1397] The present invention has been described in detail using the specific aspects, but it is obvious to those skilled in the art that various changes and modifications may be made without departing from the spirit and scope of the present invention. Note that the present application is based on the Japanese patent application (Japanese Patent Application No. 2020-066313) filed on Apr. 1, 2020 and the Japanese patent application (Japanese Patent Application No. 2020-181493) filed on Oct. 29, 2020, which are incorporated by reference in their entirety.

### SEQUENCE LISTING FREE TEXT

[1398] SEQ ID NO: 1: base sequence of human CCR6 (KG1684) VL

[1399] SEQ ID NO: 2: amino acid sequence of human CCR6 (KG168) VL

[1400] SEQ ID NO: 3: base sequence of human CCR6 (KG1684) VH

[1401] SEQ ID NO: 4 amino acid sequence of human CCR6 (KG1684) VH

[1402] SEQ ID NO: 5: base sequence of human IgG1 CK

[1403] SEQ ID NO: 6: amino acid sequence of human IgG1 CK

[1404] SEQ ID NO: 7: base sequence of human IgG1 CH

[1405] SEQ ID NO: 8: amino acid sequence of human IgG1 CH

[1406] SEQ ID NO: 9: base sequence of human IgG1_P238A CH

[1407] SEQ ID NO: 10: amino acid sequence of human IgG1_P238A CH

[1408] SEQ ID NO: 11: base sequence of human IgG1_D265A CH

[1409] SEQ ID NO: 12: amino acid sequence of human IgG1_D265A CH

[1410] SEQ ID NO: 13: base sequence of human IgG1_S267L CH

[1411] SEQ ID NO: 14: amino acid sequence of human IgG1_S267L CH

[1412] SEQ ID NO: 15: base sequence of human IgG1_P238A/D265A CH

[1413] SEQ ID NO: 16: amino acid sequence of human IgG1_P238A/D265A CH

[1414] SEQ ID NO: 17: base sequence of human IgG1_P238A/S267L CH

[1415] SEQ ID NO: 18: amino acid sequence of human IgG1_P238A/S267L CH

[1416] SEQ ID NO: 19: base sequence of human IgG1_D265A/S267L CH

[1417] SEQ ID NO: 20: amino acid sequence of human IgG1_D265A/S267L CH

[1418] SEQ ID NO. 21: base sequence of human IgG1_P238A/D265A/S267L CH

[1419] SEQ ID NO: 22: amino acid sequence of human IgG1_P238A/D265A/S267L CH

[1420] SEQ ID NO: 23: base sequence of human IgG1_K326W CH

[1421] SEQ ID NO: 24: amino acid sequence of human IgG1_K326W CH

[1422] SEQ ID NO: 25: base sequence of human IgG1_L328V CH

[1423] SEQ ID NO: 26: amino acid sequence of human IgG1_L328V CH

[1424] SEQ ID NO: 27: base sequence of human, IgG1_P329Y CH

[1425] SEQ ID NO: 28: amino acid sequence of human IgG1_P329Y CH

[1426] SEQ ID NO: 29: base sequence of human IgG1_K326W/L328V CH

[1427] SEQ ID NO: 30: amino acid sequence of human IgG1_K326W/L328 V CH

[1428] SEQ ID NO: 31: base sequence of human IgG1_K326W/P329Y CH

[1429] SEQ ID NO: 32: amino acid sequence of human IgG1_K326W/P329Y CH

[1430] SEQ ID NO: 33: base sequence of human IgG1_L328V/P329Y CH

[1431] SEQ ID NO: 34: amino acid sequence of human IgG1_L328V/P329Y CH

[1432] SEQ ID NO: 35: base sequence of human IgG1_K326W/L328V/P329Y CH

[1433] SEQ ID NO: 36: amino acid sequence of human IgG1_K326W/L328V/P329Y CH

[1434] SEQ ID NO: 37: base sequence of human IgG1114_AA_AAA_D265A CH

[1435] SEQ ID NO: 38: amino acid sequence of human IgG1114_AA_AAA_D265A CH

[1436] SEQ ID NO: 39: base sequence of human IgG1114_AA_AAA_P329Y CH

[1437] SEQ ID NO: 40: amino acid sequence of human IgG1114_AA_AAA_P329Y CH

[1438] SEQ ID NO: 41: base sequence of human CD4 (ibalizumab) VL

[1439] SEQ ID NO: 42: amino acid sequence of human CD4 (ibalizumab) VL

[1440] SEQ ID NO: 43: base sequence of human CD4 (ibalizumab) VH

[1441] SEQ ID NO: 44: amino acid sequence of human CD4 (ibalizumab) VH

[1442] SEQ ID NO: 45: base sequence of human CD70 (2H5) VL

[1443] SEQ ID NO: 46: amino acid sequence of human CD70 (2H5) VL

[1444] SEQ ID NO: 47: base sequence of human CD70 (2H5) VH

[1445] SEQ ID NO: 48: amino acid sequence of human CD70 (2H5) VH

[1446] SEQ ID NO: 49: base sequence of human IgG1114_AA_AAA_S239R CH

[1447] SEQ ID NO: 50: amino acid sequence of human IgG1114_AA_AAA_S239R CH

[1448] SEQ ID NO: 51: base sequence of human IgG1114_AA_AAA_D265N CH

[1449] SEQ ID NO: 52: amino acid sequence of human IgG1114_AA_AAA_D265N CH

[1450] SEQ ID NO: 53: base sequence of human IgG1114_AA_AAA_D265E CH

[1451] SEQ ID NO: 54: amino acid sequence of human IgG1114_AA_AAA_D265E CH

[1452] SEQ ID NO: 55: base sequence of human IgG1114_AA_AAA_S267K CH

[1453] SEQ ID NO: 56: amino acid sequence of human IgG 1114_AA_AAA_S267K CH

[1454] SEQ ID NO: 57: base sequence of human IgG1114_AA_AAA_E269P CH

[1455] SEQ ID NO: 58: amino acid sequence of human IgG1114_AA_AAA_E269P CH

[1456] SEQ ID NO: 59: base sequence of human IgG1114_AA_AAA_Y296P CH

[1457] SEQ ID NO: 60: amino acid sequence of human IgG1114_AA_AAA_Y296P CH

[1458] SEQ ID NO: 61: base sequence of human IgG1114_AA_AAA_S298E CH

[1459] SEQ ID NO: 62: amino acid sequence of human IgG1114_AA_AAA_S298E CH

[1460] SEQ ID NO: 63: base sequence of human IgG1114_AA_AAA_T299A CH

[1461] SEQ ID NO: 64: amino acid sequence of human IgG1114_AA_AAA_T299A CH

[1462] SEQ ID NO: 65: base sequence of human IgG1114_AA_AAA_L235R CH

[1463] SEQ ID NO: 66: amino acid sequence of human IgG1114_AA_AAA_L235R CH

[1464] SEQ ID NO: 67: base sequence of human IgG1114_AA_AAA_A327I CH

[1465] SEQ ID NO: 68: amino acid sequence of human IgG1114_AA_AAA_A327I CH

[1466] SEQ ID NO: 69: base sequence of human IgG1114_AA_AAA_K326G CH

[1467] SEQ ID NO: 70: amino acid sequence of human IgG1114_AA_AAA_K326G CH

[1468] SEQ ID NO: 71: base sequence of human IgG1114_AA_AAA_L328R CH

[1469] SEQ ID NO: 72: amino acid sequence of human IgG1114_AA_AAA_L328R CH

[1470] SEQ ID NO: 73: base sequence of human IgG1114_AA_AAA_P329K CH

[1471] SEQ ID NO: 74: amino acid sequence of human IgG1114_AA_AAA_P329K CH

[1472] SEQ ID NO: 75: base sequence of human IgG1114_AA_AAA_P329W CH

[1473] SEQ ID NO: 76: amino acid sequence of human IgG1114_ AA_AAA_P329W CH

[1474] SEQ ID NO: 77: base sequence of human IgG1114_AA_AAA_A330P CH

[1475] SEQ ID NO: 78: amino acid sequence of human IgG1114_AA_AAA_A330P CH

[1476] SEQ ID NOS: 79 to 82: base sequence or amino acid sequence of anti-CCR4 antibody used in Example 5

[1477] SEQ ID NOS: 83 to 204: base sequence or amino acid sequence of anti-CCR4 antibody, in which CD16a-binding enhancing amino acid alteration was introduced, used in Example 5

[1478] SEQ ID NOS: 205 to 222: base sequence or amino acid sequence of anti-CD4 antibody half-molecule, in which amino acid alteration for attenuating interaction between CH3 domains of IgG1 was introduced, used in Example 6

[1479] SEQ ID NOS: 223 to 240: base sequence or amino acid sequence of anti-CD70 antibody half-molecule, in which ammo acid alteration for attenuating interaction between CH3 domains of IgG1 was introduced, used in Example 6

[1480] SEQ ID NOS: 241 to 252: base sequences and amino acid sequences of VH and VL of anti-DNP antibody, and anti-DNP anlibody half-molecules 1 to 6 used in Example 7, 9, 10, 11, or 12

[1481] SEQ NOS: 253 to 292: base sequence or ammo acid sequence of anti-CD4 antibody half-molecule or anti-CD70 antibody half molecule, in which CD16a-binding enhancing amino acid alteration was introduced, used in Example 8, 9-2, or 11.

[1482] SEQ ID NOS: 293 to 298: base sequence or amino acid sequence of anti-CD4 antibody half-molecule or half-molecule of anti-CCR4 antibody half-molecule, in which CD16a-binding enhancing amino acid alteration was introduced, used in Example 9-2, 10-2, or 11.

1. An antibody composition, which is an antibody composition against a first antigen and a second antigen that are different from each other, comprising a first IgG half-molecule and a second IgG half-molecule, wherein the following (1A) to (6A) are satisfied:
(1A) each of the first IgG half-molecule and the second IgG half-molecule is composed of one immunoglobulin light chain (hereinafter abbreviated as L chain) and one immunoglobulin heavy chain (hereinafter abbreviated as H chain), and the H chain includes an H chain variable region, a hinge domain, a CH1 domain, a CH2 domain, and a CH3 domain, and has a first Fcγ receptor IIIA (hereinafter CD16a)-binding domain and a second CD16a-binding domain that are different from each other in the CH2 domain,
(2A) each of the first IgG half-molecule and the second IgG half-molecule includes amino acid residue substitutions of C226A and C229A numbered according to the EU index,
(3A) the first IgG half-molecule includes an antigen-binding domain that binds to the first antigen, and includes an amino acid residue substitution of D265A numbered according to the EU index in the first CD16a-binding domain,
(4A) the second IgG half-molecule includes an antigen-binding domain that binds to the second antigen, and includes an amino acid residue substitution of P329Y numbered according to the EU index in the second CD16a-binding domain,
(5A) each of the first IgG half-molecule and the second IgG half-molecule includes amino acid residue substitutions of (a) S239D and K326T numbered according to the EU index, or
each of the first IgG half-molecule and the second IgG half-molecule includes amino acid residue substitutions of (b) S239D, S298A, E333A, L242C, and K334C numbered according to the EU index, and
(6A) at least one of the first IgG half-molecule and the second IgG half-molecule includes an amino acid residue substitution in the CH3 domain as an alteration for attenuating an inter-CH3 domain interaction as compared with an inter-CH3 domain interaction of the IgG1 subclass.

2. The antibody composition according to claim 1, wherein the antibody composition exhibits an effector function specifically for a target cell coexpressing the first antigen and the second antigen and damages the target cell as compared with an effector function for a target cell expressing only the first antigen and a target cell expressing only the second antigen.

3. The antibody composition according to claim 1, wherein each of the first IgG half-molecule and the second IgG half-molecule includes at least one amino acid residue substitution selected from Y349A, L351A, T366A, L368A, D399A, F405A, Y407A, K409A, and K409R numbered according to the EU index as the alteration for attenuating the inter-CH3 domain interaction as compared with the inter-CH3 domain interaction of the IgG1 subclass.

4. The antibody composition according to claim 3, wherein each of the first IgG half-molecule and the second IgG half-molecule includes an amino acid residue substitution of K409R numbered according to the EU index as the alteration for attenuating the inter-CH3 domain interaction as compared with the inter-CH3 domain interaction of the IgG1 subclass.

5. The antibody composition according to claim 1, wherein each of the first IgG half-molecule and the second IgG half-molecule includes the amino acid residue substitutions of (a) S239D and K326T.

6. The antibody composition according to claim 1, wherein
an H chain constant region (hereinafter abbreviated as CH) of the first IgG half-molecule contains an amino acid sequence represented by SEQ ID NO: 248, and
a CH of the second IgG half-molecule contains an amino acid sequence represented by SEQ ID NO: 252.

7. The antibody composition according to claim 1, wherein a ratio of sugar chains in which fucose is not bound to N-acetylglucosamine at a reducing end of the sugar chain among the total N-glycoside-linked type sugar chains bound to an Fc region in the first IgG half-molecule and the second IgG half-molecule is 20% or more.

8. The antibody composition according to claim 1, wherein the immunoglobulin subclass of the first IgG half-molecule and the second IgG half-molecule is IgG1.

9. A first IgG half-molecule, which is a first IgG half-molecule characterized by being associated with a second IgG half-molecule, wherein the first IgG half-molecule and the second IgG half-molecule satisfy the following (1B) to (7B):
(1B) the first IgG half-molecule and the second IgG half-molecule form an antibody composition against a first antigen and a second antigen that are different from each other,
(2B) each of the first IgG half-molecule and the second IgG half-molecule is composed of one L chain and one H chain, and the H chain includes an H chain variable region, a hinge domain, a CH1 domain, a CH2 domain, and a CH3 domain, and has a first CD16a-binding domain and a second CD16a-binding domain that are different from each other in the CH2 domain,
(3B) each of the first IgG half-molecule and the second IgG half-molecule includes amino acid residue substitutions of C226A and C229A numbered according to the EU index,
(4B) the first IgG half-molecule includes an antigen-binding domain that binds to the first antigen, and includes an amino acid residue substitution of D265A numbered according to the EU index in the first CD16a-binding domain,
(5B) the second IgG half-molecule includes an antigen-binding domain that binds to the second antigen, and includes an amino acid residue substitution of P329Y numbered according to the EU index in the second CD16a-binding domain,
(6B) each of the first IgG half-molecule and the second IgG half-molecule includes amino acid residue substitutions of (a) S239D and K326T numbered according to the EU index, or
each of the first IgG half-molecule and the second IgG half-molecule includes amino acid residue substitutions of (b) S239D, S298A, E333A, L242C, and K334C numbered according to the EU index, and
(7B) at least one of the first IgG half-molecule and the second IgG half-molecule includes an amino acid residue substitution in the CH3 domain as an alteration for attenuating an inter-CH3 domain interaction as compared with an inter-CH3 domain interaction of the IgG1 subclass.

10. A second IgG half-molecule, which is a second IgG half-molecule characterized by being associated with a first IgG half-molecule, wherein the first IgG half-molecule and the second IgG half-molecule satisfy the following (1C) to (7C):
(1C) the first IgG half-molecule and the second IgG half-molecule form an antibody composition against a first antigen and a second antigen that are different from each other,
(2C) each of the first IgG half-molecule and the second IgG half-molecule is composed of one L chain and one H chain, and the H chain includes an H chain variable region, a hinge domain, a CH1 domain, a CH2 domain, and a CH3 domain, and has a first CD16a-binding domain and a second CD16a-binding domain that are different from each other in the CH2 domain,
(3C) each of the first IgG half-molecule and the second IgG half-molecule includes amino acid residue substitutions of C226A and C229A numbered according to the EU index,
(4C) the first IgG half-molecule includes an antigen-binding domain that binds to the first antigen, and includes an amino acid residue substitution of D265A numbered according to the EU index in the first CD16a-binding domain,
(5C) the second IgG half-molecule includes an antigen-binding domain that binds to the second antigen, and includes an amino acid residue substitution of P329Y numbered according to the EU index in the second CD16a-binding domain,
(6C) each of the first IgG half-molecule and the second IgG half-molecule includes amino acid residue substitutions of (a) S239D and K326T numbered according to the EU index, or
each of the first IgG half-molecule and the second IgG half-molecule includes amino acid residue substitutions of (b) S239D, S298A, E333A, L242C, and K334C numbered according to the EU index, and
(7C) at least one of the first IgG half-molecule and the second IgG half-molecule includes an amino acid residue substitution in the CH3 domain as an alteration for attenuating an inter-CH3 domain interaction as compared with an inter-CH3 domain interaction of the IgG1 subclass.

11. A DNA molecule encoding
an amino acid sequence of the first IgG half-molecule according to claim 9.

12. A recombinant vector, comprising at least the DNA molecule according to claim 11.

13. A transformant, in which the recombinant vector according to claim 12 is introduced.

14. A kit, comprising a first IgG half-molecule and a second IgG half-molecule characterized by being associated with each other, wherein the first IgG half-molecule and the second IgG half-molecule satisfy the following (1D) to (7D):
(1D) the first IgG half-molecule and the second IgG half-molecule form an antibody composition against a first antigen and a second antigen that are different from each other,
(2D) each of the first IgG half-molecule and the second IgG half-molecule is composed of one L chain and one H chain, and the H chain includes an H chain variable region, a hinge domain, a CH1 domain, a CH2 domain, and a CH3 domain, and has a first CD16a-binding domain and a second CD16a-binding domain that are different from each other in the CH2 domain,
(3D) each of the first IgG half-molecule and the second IgG half-molecule includes amino acid residue substitutions of C226A and C229A numbered according to the EU index,
(4D) the first IgG half-molecule includes an antigen-binding domain that binds to the first antigen, and includes an amino acid residue substitution of D265A numbered according to the EU index in the first CD16a-binding domain,
(5D) the second IgG half-molecule includes an antigen-binding domain that binds to the second antigen, and includes an amino acid residue substitution of P329Y numbered according to the EU index in the second CD16a-binding domain,
(6D) each of the first IgG half-molecule and the second IgG half-molecule includes amino acid residue substitutions of (a) S239D and K326T numbered according to the EU index, or each of the first IgG half-molecule and the second IgG half-molecule includes amino acid residue substitutions of (b) S239D, S298A, E333A, L242C, and K334C numbered according to the EU index, and
(7D) at least one of the first IgG half-molecule and the second IgG half-molecule includes an amino acid residue substitution in the CH3 domain as an alteration for attenuating an inter-CH3 domain interaction as compared with an inter-CH3 domain interaction of the IgG1 subclass.

15. A method for inducing an effector function specifically for a target cell coexpressing the first antigen and the second antigen as compared with an effector function for a target cell expressing only the first antigen and a target cell expressing only the second antigen using the antibody composition according to claim 1.

16. A pharmaceutical composition, comprising the antibody composition according to claim 1.

17. The pharmaceutical composition according to claim 16, for use in a treatment of a cancer, an autoimmune disease, or an allergic disease.

18. A DNA molecule encoding an amino acid sequence of the second IgG half-molecule according to claim 10.

19. A recombinant vector, comprising at least the DNA molecule according to claim 18.

20. A transformant, in which the recombinant vector according to claim 19 is introduced.

The application's sequence listing, which the Patent Office published only in electronic form, follows.

SEQUENCE LISTING (298 sequences)

SEQ ID NO: 1 - DNA, 336 bp, Artificial Sequence
  Description of the artificial sequence: base sequence of CCR6 (KG1684) VL
gatatcgtgatgacacaatccccactgtccctgcctgtcacccctggagagcctgcctccatctcttgccggtcaagtcagagccttgtacatactgatggaaacacctacttgcattggtacctgcagaagccaggccagtctccacagctcctcatctatcgggtttccaacagattttctggggtgccagacaggttcagtggcagtgggtcagggacagatttcaccctcaagatcagcagggttgaggccgaggacgtgggagtttattactgctcacaaagaacatactttcctctcacgttcggtcaggggaccaagctggagatcaaa

SEQ ID NO: 2 - protein, 112 aa, Artificial Sequence
  Description of the artificial sequence: amino acid sequence of CCR6 (KG1684) VL
DIVMTQSPLSLPVTPGEPASISCRSSQSLVHTDGNTYLHWYLQKPGQSPQLLIYRVSNRFSGVPDRFSGSGSGTDFTLKISRVEAEDVGVYYCSQRTYFPLTFGQGTKLEIK

SEQ ID NO: 3 - DNA, 342 bp, Artificial Sequence
  Description of the artificial sequence: base sequence of CCR6 (KG1684) VH
caggtgcagctgcaggagtccggacctggcctggtgaagccgtcccagaccctgtccctcacctgcactgtctctgggttctcagtgtccagctcccgtgtacactggatccgccagcctccaggaaagggtctggagtggatcggagtcatatattatgatggaaaaacagattataatgcaggacttaaatccagagtgaccatcagccgcgacacctccaagtcccaattctccctaaaactgtccagtgtgaccgccgccgacacagccgtgtattattgtgccggcggggttattatggatgcctggggtcaaggaaccctcgtcactgtctcctcc

SEQ ID NO: 4 - protein, 114 aa, Artificial Sequence
  Description of the artificial sequence: amino acid sequence of CCR6 (KG1684) VH
QVQLQESGPGLVKPSQTLSLTCTVSGFSVSSSRVHWIRQPPGKGLEWIGVIYYDGKTDYNAGLKSRVTISRDTSKSQFSLKLSSVTAADTAVYYCAGGVIMDAWGQGTLVTVSS

SEQ ID NO: 5 - DNA, 324 bp, Artificial Sequence
  Description of the artificial sequence: base sequence of IgG1 CK
cgtacggtggctgcaccatctgtcttcatcttcccgccatctgatgagcagttgaaatctggaactgcctctgttgtgtgcctgctgaataacttctatcccagagaggccaaagtacagtggaaggtggataacgccctccaatcgggtaactcccaggagagtgtcacagagcaggacagcaaggacagcacctacagcctcagcagcaccctgacgctgagcaaagcagactacgagaaacacaaagtctacgcctgcgaagtcacccatcagggcctgagctcgcccgtcacaaagagcttcaacaggggagagtgttga

SEQ ID NO: 6 - protein, 107 aa, Artificial Sequence [sequence omitted]

SEQ ID NO: 7 - DNA, 993 bp, Artificial Sequence
  Description of the artificial sequence: base sequence of IgG1 CH
gctagcaccaagggcccatcggtcttccccctggcaccctcctccaagagcacctctgggggcacagcggccctgggctgcctggtcaaggactacttccccgaaccggtgacggtgtcgtggaactcaggcgccctgaccagcggcgtgcacaccttcccggctgtcctacagtcctcaggactctactccctcagcagcgtggtgaccgtgccctccagcagcttgggcacccagacctacatctgcaacgtgaatcacaagcccagcaacaccaaggtggacaagaaagttgagcccaaatcttgtgacaaaactcacacatgcccaccgtgcccagcacctgaactcctggggggaccgtcagtcttcctcttccccccaaaacccaaggacaccctcatgatctcccggacccctgaggtcacatgcgtggtggtggacgtgagccacgaagaccctgaggtcaagttcaactggtacgtggacggcgtggaggtgcataatgccaagacaaagccgcgggaggagcagtacaacagcacgtaccgtgtggtcagcgtcctcaccgtcctgcaccaggactggctgaatggcaaggagtacaagtgcaaggtctccaacaaagccctcccagcccccatcgagaaaaccatctccaaagccaaagggcagccccgagaaccacaggtgtacaccctgcccccatcccgggatgagctgaccaagaaccaggtcagcctgacctgcctggtcaaaggcttctatcccagcgacatcgccgtggagtgggagagcaatgggcagccggagaacaactacaagaccacgcctcccgtgctggactccgacggctccttcttcctctacagcaagctcaccgtggacaagagcaggtggcagcaggggaacgtcttctcatgctccgtgatgcatgaggctctgcacaaccactacacgcagaagagcctctccctgtctccgggtaaatga

SEQ ID NO: 8 - protein, 330 aa, Artificial Sequence [sequence omitted]

SEQ ID NO: 9 - DNA, 993 bp, Artificial Sequence
  Description of the artificial sequence: base sequence of IgG1_P238A CH
gctagcaccaagggcccatcggtcttccccctggcaccctcctccaagagcacctctgggggcacagcggccctgggctgcctggtcaaggactacttccccgaaccggtgacggtgtcgtggaactcaggcgccctgaccagcggcgtgcacaccttcccggctgtcctacagtcctcaggactctactccctcagcagcgtggtgaccgtgccctccagcagcttgggcacccagacctacatctgcaacgtgaatcacaagcccagcaacaccaaggtggacaagaaagttgagcccaaatcttgtgacaaaactcacacatgcccaccgtgcccagcacctgaactcctggggggagcgtcagtcttcctcttccccccaaaacccaaggacaccctcatgatctcccggacccctgaggtcacatgcgtggtggtggacgtgagccacgaagaccctgaggtcaagttcaactggtacgtggacggcgtggaggtgcataatgccaagacaaagccgcgggaggagcagtacaacagcacgtaccgtgtggtcagcgtcctcaccgtcctgcaccaggactggctgaatggcaaggagtacaagtgcaaggtctccaacaaagccctcccagcccccatcgagaaaaccatctccaaagccaaagggcagccccgagaaccacaggtgtacaccctgcccccatcccgggatgagctgaccaagaaccaggtcagcctgacctgcctggtcaaaggcttctatcccagcgacatcgccgtggagtgggagagcaatgggcagccggagaacaactacaagaccacgcctcccgtgctggactccgacggctccttcttcctctacagcaagctcaccgtggacaagagcaggtggcagcaggggaacgtcttctcatgctccgtgatgcatgaggctctgcacaaccactacacgcagaagagcctctccctgtctccgggtaaatga

SEQ ID NO: 10 - protein, 330 aa, Artificial Sequence
  Description of the artificial sequence: amino acid sequence of IgG1_P238A CH
ASTKGPSVFPLAPSSKSTSGGTAALGCLVKDYFPEPVTVSWNSGALTSGVHTFPAVLQSSGLYSLSSVVTVPSSSLGTQTYICNVNHKPSNTKVDKKVEPKSCDKTHTCPPCPAPELLGGASVFLFPPKPKDTLMISRTPEVTCVVVDVSHEDPEVKFNWYVDGVEVHNAKTKPREEQYNSTYRVVSVLTVLHQDWLNGKEYKCKVSNKALPAPIEKTISKAKGQPREPQVYTLPPSRDELTKNQVSLTCLVKGFYPSDIAVEWESNGQPENNYKTTPPVLDSDGSFFLYSKLTVDKSRWQQGNVFSCSVMHEALHNHYTQKSLSLSPGK

SEQ ID NO: 11 - DNA, 993 bp, Artificial Sequence
  Description of the artificial sequence: base sequence of IgG1_D265A CH
gctagcaccaagggcccatcggtcttccccctggcaccctcctccaagagcacctctgggggcacagcggccctgggctgcctggtcaaggactacttccccgaaccggtgacggtgtcgtggaactcaggcgccctgaccagcggcgtgcacaccttcccggctgtcctacagtcctcaggactctactccctcagcagcgtggtgaccgtgccctccagcagcttgggcacccagacctacatctgcaacgtgaatcacaagcccagcaacaccaaggtggacaagaaagttgagcccaaatcttgtgacaaaactcacacatgcccaccgtgcccagcacctgaactcctggggggaccgtcagtcttcctcttccccccaaaacccaaggacaccctcatgatctcccggacccctgaggtcacatgcgtggtggtggccgtgagccacgaagaccctgaggtcaagttcaactggtacgtggacggcgtggaggtgcataatgccaagacaaagccgcgggaggagcagtacaacagcacgtaccgtgtggtcagcgtcctcaccgtcctgcaccaggactggctgaatggcaaggagtacaagtgcaaggtctccaacaaagccctcccagcccccatcgagaaaaccatctccaaagccaaagggcagccccgagaaccacaggtgtacaccctgcccccatcccgggatgagctgaccaagaaccaggtcagcctgacctgcctggtcaaaggcttctatcccagcgacatcgccgtggagtgggagagcaatgggcagccggagaacaactacaagaccacgcctcccgtgctggactccgacggctccttcttcctctacagcaagctcaccgtggacaagagcaggtggcagcaggggaacgtcttctcatgctccgtgatgcatgaggctctgcacaaccactacacgcagaagagcctctccctgtctccgggtaaatga

SEQ ID NO: 12 - protein, 330 aa, Artificial Sequence
  Description of the artificial sequence: amino acid sequence of IgG1_D265A CH
ASTKGPSVFPLAPSSKSTSGGTAALGCLVKDYFPEPVTVSWNSGALTSGVHTFPAVLQSSGLYSLSSVVTVPSSSLGTQTYICNVNHKPSNTKVDKKVEPKSCDKTHTCPPCPAPELLGGPSVFLFPPKPKDTLMISRTPEVTCVVVAVSHEDPEVKFNWYVDGVEVHNAKTKPREEQYNSTYRVVSVLTVLHQDWLNGKEYKCKVSNKALPAPIEKTISKAKGQPREPQVYTLPPSRDELTKNQVSLTCLVKGFYPSDIAVEWESNGQPENNYKTTPPVLDSDGSFFLYSKLTVDKSRWQQGNVFSCSVMHEALHNHYTQKSLSLSPGK

SEQ ID NO: 13 - DNA, 993 bp, Artificial Sequence
  Description of the artificial sequence: base sequence of IgG1_S267L CH
gctagcaccaagggcccatcggtcttccccctggcaccctcctccaagagcacctctgggggcacagcggccctgggctgcctggtcaaggactacttccccgaaccggtgacggtgtcgtggaactcaggcgccctgaccagcggcgtgcacaccttcccggctgtcctacagtcctcaggactctactccctcagcagcgtggtgaccgtgccctccagcagcttgggcacccagacctacatctgcaacgtgaatcacaagcccagcaacaccaaggtggacaagaaagttgagcccaaatcttgtgacaaaactcacacatgcccaccgtgcccagcacctgaactcctggggggaccgtcagtcttcctcttccccccaaaacccaaggacaccctcatgatctcccggacccctgaggtcacatgcgtggtggtggacgtgctccacgaagaccctgaggtcaagttcaactggtacgtggacggcgtggaggtgcataatgccaagacaaagccgcgggaggagcagtacaacagcacgtaccgtgtggtcagcgtcctcaccgtcctgcaccaggactggctgaatggcaaggagtacaagtgcaaggtctccaacaaagccctcccagcccccatcgagaaaaccatctccaaagccaaagggcagccccgagaaccacaggtgtacaccctgcccccatcccgggatgagctgaccaagaaccaggtcagcctgacctgcctggtcaaaggcttctatcccagcgacatcgccgtggagtgggagagcaatgggcagccggagaacaactacaagaccacgcctcccgtgctggactccgacggctccttcttcctctacagcaagctcaccgtggacaagagcaggtggcagcaggggaacgtcttctcatgctccgtgatgcatgaggctctgcacaaccactacacgcagaagagcctctccctgtctccgggtaaatga

SEQ ID NO: 14 - protein, 330 aa, Artificial Sequence
  Description of the artificial sequence: amino acid sequence of IgG1_S267L CH
ASTKGPSVFPLAPSSKSTSGGTAALGCLVKDYFPEPVTVSWNSGALTSGVHTFPAVLQSSGLYSLSSVVTVPSSSLGTQTYICNVNHKPSNTKVDKKVEPKSCDKTHTCPPCPAPELLGGPSVFLFPPKPKDTLMISRTPEVTCVVVDVLHEDPEVKFNWYVDGVEVHNAKTKPREEQYNSTYRVVSVLTVLHQDWLNGKEYKCKVSNKALPAPIEKTISKAKGQPREPQVYTLPPSRDELTKNQVSLTCLVKGFYPSDIAVEWESNGQPENNYKTTPPVLDSDGSFFLYSKLTVDKSRWQQGNVFSCSVMHEALHNHYTQKSLSLSPGK

SEQ ID NO: 15 - DNA, 993 bp, Artificial Sequence
  Description of the artificial sequence: base sequence of IgG1_P238A/D265A CH
gctagcaccaagggcccatcggtcttccccctggcaccctcctccaagagcacctctgggggcacagcggccctgggctgcctggtcaaggactacttccccgaaccggtgacggtgtcgtggaactcaggcgccctgaccagcggcgtgcacaccttcccggctgtcctacagtcctcaggactctactccctcagcagcgtggtgaccgtgccctccagcagcttgggcacccagacctacatctgcaacgtgaatcacaagcccagcaacaccaaggtggacaagaaagttgagcccaaatcttgtgacaaaactcacacatgcccaccgtgcccagcacctgaactcctggggggagcgtcagtcttcctcttccccccaaaacccaaggacaccctcatgatctcccggacccctgaggtcacatgcgtggtggtggccgtgagccacgaagaccctgaggtcaagttcaactggtacgtggacggcgtggaggtgcataatgccaagacaaagccgcgggaggagcagtacaacagcacgtaccgtgtggtcagcgtcctcaccgtcctgcaccaggactggctgaatggcaaggagtacaagtgcaaggtctccaacaaagccctcccagcccccatcgagaaaaccatctccaaagccaaagggcagccccgagaaccacaggtgtacaccctgcccccatcccgggatgagctgaccaagaaccaggtcagcctgacctgcctggtcaaaggcttctatcccagcgacatcgccgtggagtgggagagcaatgggcagccggagaacaactacaagaccacgcctcccgtgctggactccgacggctccttcttcctctacagcaagctcaccgtggacaagagcaggtggcagcaggggaacgtcttctcatgctccgtgatgcatgaggctctgcacaaccactacacgcagaagagcctctccctgtctccgggtaaatga

SEQ ID NO: 16 - protein, 330 aa, Artificial Sequence
  Description of the artificial sequence: amino acid sequence of IgG1_P238A/D265A CH
ASTKGPSVFPLAPSSKSTSGGTAALGCLVKDYFPEPVTVSWNSGALTSGVHTFPAVLQSSGLYSLSSVVTVPSSSLGTQTYICNVNHKPSNTKVDKKVEPKSCDKTHTCPPCPAPELLGGASVFLFPPKPKDTLMISRTPEVTCVVVAVSHEDPEVKFNWYVDGVEVHNAKTKPREEQYNSTYRVVSVLTVLHQDWLNGKEYKCKVSNKALPAPIEKTISKAKGQPREPQVYTLPPSRDELTKNQVSLTCLVKGFYPSDIAVEWESNGQPENNYKTTPPVLDSDGSFFLYSKLTVDKSRWQQGNVFSCSVMHEALHNHYTQKSLSLSPGK

SEQ ID NO: 17 - DNA, 993 bp, Artificial Sequence
  Description of the artificial sequence: base sequence of IgG1_P238A/S267L CH
gctagcaccaagggcccatcggtcttccccctggcaccctcctccaagagcacctctgggggcacagcggccctgggctgcctggtcaaggactacttccccgaaccggtgacggtgtcgtggaactcaggcgccctgaccagcggcgtgcacaccttcccggctgtcctacagtcctcaggactctactccctcagcagcgtggtgaccgtgccctccagcagcttgggcacccagacctacatctgcaacgtgaatcacaagcccagcaacaccaaggtggacaagaaagttgagcccaaatcttgtgacaaaactcacacatgcccaccgtgcccagcacctgaactcctggggggagcgtcagtcttcctcttccccccaaaacccaaggacaccctcatgatctcccggacccctgaggtcacatgcgtggtggtggacgtgctccacgaagaccctgaggtcaagttcaactggtacgtggacggcgtggaggtgcataatgccaagacaaagccgcgggaggagcagtacaacagcacgtaccgtgtggtcagcgtcctcaccgtcctgcaccaggactggctgaatggcaaggagtacaagtgcaaggtctccaacaaagccctcccagcccccatcgagaaaaccatctccaaagccaaagggcagccccgagaaccacaggtgtacaccctgcccccatcccgggatgagctgaccaagaaccaggtcagcctgacctgcctggtcaaaggcttctatcccagcgacatcgccgtggagtgggagagcaatgggcagccggagaacaactacaagaccacgcctcccgtgctggactccgacggctccttcttcctctacagcaagctcaccgtggacaagagcaggtggcagcaggggaacgtcttctcatgctccgtgatgcatgaggctctgcacaaccactacacgcagaagagcctctccctgtctccgggtaaatga

SEQ ID NO: 18 - protein, 330 aa, Artificial Sequence
  Description of the artificial sequence: amino acid sequence of IgG1_P238A/S267L CH
ASTKGPSVFPLAPSSKSTSGGTAALGCLVKDYFPEPVTVSWNSGALTSGVHTFPAVLQSSGLYSLSSVVTVPSSSLGTQTYICNVNHKPSNTKVDKKVEPKSCDKTHTCPPCPAPELLGGASVFLFPPKPKDTLMISRTPEVTCVVVDVLHEDPEVKFNWYVDGVEVHNAKTKPREEQYNSTYRVVSVLTVLHQDWLNGKEYKCKVSNKALPAPIEKTISKAKGQPREPQVYTLPPSRDELTKNQVSLTCLVKGFYPSDIAVEWESNGQPENNYKTTPPVLDSDGSFFLYSKLTVDKSRWQQGNVFSCSVMHEALHNHYTQKSLSLSPGK

SEQ ID NO: 19 - DNA, 993 bp, Artificial Sequence
  Description of the artificial sequence: base sequence of IgG1_D265A/S267L CH
gctagcaccaagggcccatcggtcttccccctggcaccctcctccaagagcacctctgggggcacagcggccctgggctgcctggtcaaggactacttccccgaaccggtgacggtgtcgtggaactcaggcgccctgaccagcggcgtgcacaccttcccggctgtcctacagtcctcaggactctactccctcagcagcgtggtgaccgtgccctccagcagcttgggcacccagacctacatctgcaacgtgaatcacaagcccagcaacaccaaggtggacaagaaagttgagcccaaatcttgtgacaaaactcacacatgcccaccgtgcccagcacctgaactcctggggggaccgtcagtcttcctcttccccccaaaacccaaggacaccctcatgatctcccggacccctgaggtcacatgcgtggtggtggccgtgctccacgaagaccctgaggtcaagttcaactggtacgtggacggcgtggaggtgcataatgccaagacaaagccgcgggaggagcagtacaacagcacgtaccgtgtggtcagcgtcctcaccgtcctgcaccaggactggctgaatggcaaggagtacaagtgcaaggtctccaacaaagccctcccagcccccatcgagaaaaccatctccaaagccaaagggcagccccgagaaccacaggtgtacaccctgcccccatcccgggatgagctgaccaagaaccaggtcagcctgacctgcctggtcaaaggcttctatcccagcgacatcgccgtggagtgggagagcaatgggcagccggagaacaactacaagaccacgcctcccgtgctggactccgacggctccttcttcctctacagcaagctcaccgtggacaagagcaggtggcagcaggggaacgtcttctcatgctccgtgatgcatgaggctctgcacaaccactacacgcagaagagcctctccctgtctccgggtaaatga

SEQ ID NO: 20 - protein, 330 aa, Artificial Sequence
  Description of the artificial sequence: amino acid sequence of IgG1_D265A/S267L CH
ASTKGPSVFPLAPSSKSTSGGTAALGCLVKDYFPEPVTVSWNSGALTSGVHTFPAVLQSSGLYSLSSVVTVPSSSLGTQTYICNVNHKPSNTKVDKKVEPKSCDKTHTCPPCPAPELLGGPSVFLFPPKPKDTLMISRTPEVTCVVVAVLHEDPEVKFNWYVDGVEVHNAKTKPREEQYNSTYRVVSVLTVLHQDWLNGKEYKCKVSNKALPAPIEKTISKAKGQPREPQVYTLPPSRDELTKNQVSLTCLVKGFYPSDIAVEWESNGQPENNYKTTPPVLDSDGSFFLYSKLTVDKSRWQQGNVFSCSVMHEALHNHYTQKSLSLSPGK

SEQ ID NO: 21 - DNA, 993 bp, Artificial Sequence
  Description of the artificial sequence: base sequence of IgG1_P238A/D265A/S267L CH
gctagcaccaagggcccatcggtcttccccctggcaccctcctccaagagcacctctgggggcacagcggccctgggctgcctggtcaaggactacttccccgaaccggtgacggtgtcgtggaactcaggcgccctgaccagcggcgtgcacaccttcccggctgtcctacagtcctcaggactctactccctcagcagcgtggtgaccgtgccctccagcagcttgggcacccagacctacatctgcaacgtgaatcacaagcccagcaacaccaaggtggacaagaaagttgagcccaaatcttgtgacaaaactcacacatgcccaccgtgcccagcacctgaactcctggggggagcgtcagtcttcctcttccccccaaaacccaaggacaccctcatgatctcccggacccctgaggtcacatgcgtggtggtggccgtgctccacgaagaccctgaggtcaagttcaactggtacgtggacggcgtggaggtgcataatgccaagacaaagccgcgggaggagcagtacaacagcacgtaccgtgtggtcagcgtcctcaccgtcctgcaccaggactggctgaatggcaaggagtacaagtgcaaggtctccaacaaagccctcccagcccccatcgagaaaaccatctccaaagccaaagggcagccccgagaaccacaggtgtacaccctgcccccatcccgggatgagctgaccaagaaccaggtcagcctgacctgcctggtcaaaggcttctatcccagcgacatcgccgtggagtgggagagcaatgggcagccggagaacaactacaagaccacgcctcccgtgctggactccgacggctccttcttcctctacagcaagctcaccgtggacaagagcaggtggcagcaggggaacgtcttctcatgctccgtgatgcatgaggctctgcacaaccactacacgcagaagagcctctccctgtctccgggtaaatga

SEQ ID NO: 22 - protein, 330 aa, Artificial Sequence
  Description of the artificial sequence: amino acid sequence of IgG1_P238A/D265A/S267L CH
ASTKGPSVFPLAPSSKSTSGGTAALGCLVKDYFPEPVTVSWNSGALTSGVHTFPAVLQSSGLYSLSSVVTVPSSSLGTQTYICNVNHKPSNTKVDKKVEPKSCDKTHTCPPCPAPELLGGASVFLFPPKPKDTLMISRTPEVTCVVVAVLHEDPEVKFNWYVDGVEVHNAKTKPREEQYNSTYRVVSVLTVLHQDWLNGKEYKCKVSNKALPAPIEKTISKAKGQPREPQVYTLPPSRDELTKNQVSLTCLVKGFYPSDIAVEWESNGQPENNYKTTPPVLDSDGSFFLYSKLTVDKSRWQQGNVFSCSVMHEALHNHYTQKSLSLSPGK

SEQ ID NO: 23 - DNA, 993 bp, Artificial Sequence
  Description of the artificial sequence: base sequence of IgG1_K326W CH
gctagcaccaagggcccatcggtcttccccctggcaccctcctccaagagcacctctgggggcacagcggccctgggctgcctggtcaaggactacttccccgaaccggtgacggtgtcgtggaactcaggcgccctgaccagcggcgtgcacaccttcccggctgtcctacagtcctcaggactctactccctcagcagcgtggtgaccgtgccctccagcagcttgggcacccagacctacatctgcaacgtgaatcacaagcccagcaacaccaaggtggacaagaaagttgagcccaaatcttgtgacaaaactcacacatgcccaccgtgcccagcacctgaactcctggggggaccgtcagtcttcctcttccccccaaaacccaaggacaccctcatgatctcccggacccctgaggtcacatgcgtggtggtggacgtgagccacgaagaccctgaggtcaagttcaactggtacgtggacggcgtggaggtgcataatgccaagacaaagccgcgggaggagcagtacaacagcacgtaccgtgtggtcagcgtcctcaccgtcctgcaccaggactggctgaatggcaaggagtacaagtgcaaggtctccaactgggccctcccagcccccatcgagaaaaccatctccaaagccaaagggcagccccgagaaccacaggtgtacaccctgcccccatcccgggatgagctgaccaagaaccaggtcagcctgacctgcctggtcaaaggcttctatcccagcgacatcgccgtggagtgggagagcaatgggcagccggagaacaactacaagaccacgcctcccgtgctggactccgacggctccttcttcctctacagcaagctcaccgtggacaagagcaggtggcagcaggggaacgtcttctcatgctccgtgatgcatgaggctctgcacaaccactacacgcagaagagcctctccctgtctccgggtaaatga

SEQ ID NO: 24 - protein, 330 aa, Artificial Sequence
  Description of the artificial sequence: amino acid sequence of IgG1_K326W CH
ASTKGPSVFPLAPSSKSTSGGTAALGCLVKDYFPEPVTVSWNSGALTSGVHTFPAVLQSSGLYSLSSVVTVPSSSLGTQTYICNVNHKPSNTKVDKKVEPKSCDKTHTCPPCPAPELLGGPSVFLFPPKPKDTLMISRTPEVTCVVVDVSHEDPEVKFNWYVDGVEVHNAKTKPREEQYNSTYRVVSVLTVLHQDWLNGKEYKCKVSNWALPAPIEKTISKAKGQPREPQVYTLPPSRDELTKNQVSLTCLVKGFYPSDIAVEWESNGQPENNYKTTPPVLDSDGSFFLYSKLTVDKSRWQQGNVFSCSVMHEALHNHYTQKSLSLSPGK

SEQ ID NO: 25 - DNA, 993 bp, Artificial Sequence
  Description of the artificial sequence: base sequence of IgG1_L328V CH
gctagcaccaagggcccatcggtcttccccctggcaccctcctccaagagcacctctgggggcacagcggccctgggctgcctggtcaaggactacttccccgaaccggtgacggtgtcgtggaactcaggcgccctgaccagcggcgtgcacaccttcccggctgtcctacagtcctcaggactctactccctcagcagcgtggtgaccgtgccctccagcagcttgggcacccagacctacatctgcaacgtgaatcacaagcccagcaacaccaaggtggacaagaaagttgagcccaaatcttgtgacaaaactcacacatgcccaccgtgcccagcacctgaactcctggggggaccgtcagtcttcctcttccccccaaaacccaaggacaccctcatgatctcccggacccctgaggtcacatgcgtggtggtggacgtgagccacgaagaccctgaggtcaagttcaactggtacgtggacggcgtggaggtgcataatgccaagacaaagccgcgggaggagcagtacaacagcacgtaccgtgtggtcagcgtcctcaccgtcctgcaccaggactggctgaatggcaaggagtacaagtgcaaggtctccaacaaagccgtcccagcccccatcgagaaaaccatctccaaagccaaagggcagccccgagaaccacaggtgtacaccctgcccccatcccgggatgagctgaccaagaaccaggtcagcctgacctgcctggtcaaaggcttctatcccagcgacatcgccgtggagtgggagagcaatgggcagccggagaacaactacaagaccacgcctcccgtgctggactccgacggctccttcttcctctacagcaagctcaccgtggacaagagcaggtggcagcaggggaacgtcttctcatgctccgtgatgcatgaggctctgcacaaccactacacgcagaagagcctctccctgtctccgggtaaatga

SEQ ID NO: 26 - protein, 330 aa, Artificial Sequence
  Description of the artificial sequence: amino acid sequence of IgG1_L328V CH
ASTKGPSVFPLAPSSKSTSGGTAALGCLVKDYFPEPVTVSWNSGALTSGVHTFPAVLQSSGLYSLSSVVTVPSSSLGTQTYICNVNHKPSNTKVDKKVEPKSCDKTHTCPPCPAPELLGGPSVFLFPPKPKDTLMISRTPEVTCVVVDVSHEDPEVKFNWYVDGVEVHNAKTKPREEQYNSTYRVVSVLTVLHQDWLNGKEYKCKVSNKAVPAPIEKTISKAKGQPREPQVYTLPPSRDELTKNQVSLTCLVKGFYPSDIAVEWESNGQPENNYKTTPPVLDSDGSFFLYSKLTVDKSRWQQGNVFSCSVMHEALHNHYTQKSLSLSPGK

SEQ ID NO: 27 - DNA, 993 bp, Artificial Sequence
  Description of the artificial sequence: base sequence of IgG1_P329Y CH
gctagcaccaagggcccatcggtcttccccctggcaccctcctccaagagcacctctgggggcacagcggccctgggctgcctggtcaaggactacttccccgaaccggtgacggtgtcgtggaactcaggcgccctgaccagcggcgtgcacaccttcccggctgtcctacagtcctcaggactctactccctcagcagcgtggtgaccgtgccctccagcagcttgggcacccagacctacatctgcaacgtgaatcacaagcccagcaacaccaaggtggacaagaaagttgagcccaaatcttgtgacaaaactcacacatgcccaccgtgcccagcacctgaactcctggggggaccgtcagtcttcctcttccccccaaaacccaaggacaccctcatgatctcccggacccctgaggtcacatgcgtggtggtggacgtgagccacgaagaccctgaggtcaagttcaactggtacgtggacggcgtggaggtgcataatgccaagacaaagccgcgggaggagcagtacaacagcacgtaccgtgtggtcagcgtcctcaccgtcctgcaccaggactggctgaatggcaaggagtacaagtgcaaggtctccaacaaagccctctacgcccccatcgagaaaaccatctccaaagccaaagggcagccccgagaaccacaggtgtacaccctgcccccatcccgggatgagctgaccaagaaccaggtcagcctgacctgcctggtcaaaggcttctatcccagcgacatcgccgtggagtgggagagcaatgggcagccggagaacaactacaagaccacgcctcccgtgctggactccgacggctccttcttcctctacagcaagctcaccgtggacaagagcaggtggcagcaggggaacgtcttctcatgctccgtgatgcatgaggctctgcacaaccactacacgcagaagagcctctccctgtctccgggtaaatga

SEQ ID NO: 28 - protein, 330 aa, Artificial Sequence
  Description of the artificial sequence: amino acid sequence of IgG1_P329Y CH
ASTKGPSVFPLAPSSKSTSGGTAALGCLVKDYFPEPVTVSWNSGALTSGVHTFPAVLQSSGLYSLSSVVTVPSSSLGTQTYICNVNHKPSNTKVDKKVEPKSCDKTHTCPPCPAPELLGGPSVFLFPPKPKDTLMISRTPEVTCVVVDVSHEDPEVKFNWYVDGVEVHNAKTKPREEQYNSTYRVVSVLTVLHQDWLNGKEYKCKVSNKALYAPIEKTISKAKGQPREPQVYTLPPSRDELTKNQVSLTCLVKGFYPSDIAVEWESNGQPENNYKTTPPVLDSDGSFFLYSKLTVDKSRWQQGNVFSCSVMHEALHNHYTQKSLSLSPGK

SEQ ID NO: 29 - DNA, 993 bp, Artificial Sequence
  Description of the artificial sequence: base sequence of IgG1_K326W/L328V CH
gctagcaccaagggcccatcggtcttccccctggcaccctcctccaagagcacctctgggggcacagcggccctgggctgcctggtcaaggactacttccccgaaccggtgacggtgtcgtggaactcaggcgccctgaccagcggcgtgcacaccttcccggctgtcctacagtcctcaggactctactccctcagcagcgtggtgaccgtgccctccagcagcttgggcacccagacctacatctgcaacgtgaatcacaagcccagcaacaccaaggtggacaagaaagttgagcccaaatcttgtgacaaaactcacacatgcccaccgtgcccagcacctgaactcctggggggaccgtcagtcttcctcttccccccaaaacccaaggacaccctcatgatctcccggacccctgaggtcacatgcgtggtggtggacgtgagccacgaagaccctgaggtcaagttcaactggtacgtggacggcgtggaggtgcataatgccaagacaaagccgcgggaggagcagtacaacagcacgtaccgtgtggtcagcgtcctcaccgtcctgcaccaggactggctgaatggcaaggagtacaagtgcaaggtctccaactgggccgtcccagcccccatcgagaaaaccatctccaaagccaaagggcagccccgagaaccacaggtgtacaccctgcccccatcccgggatgagctgaccaagaaccaggtcagcctgacctgcctggtcaaaggcttctatcccagcgacatcgccgtggagtgggagagcaatgggcagccggagaacaactacaagaccacgcctcccgtgctggactccgacggctccttcttcctctacagcaagctcaccgtggacaagagcaggtggcagcaggggaacgtcttctcatgctccgtgatgcatgaggctctgcacaaccactacacgcagaagagcctctccctgtctccgggtaaatga

SEQ ID NO: 30 - protein, 330 aa, Artificial Sequence
  Description of the artificial sequence: amino acid sequence of IgG1_K326W/L328V CH
ASTKGPSVFPLAPSSKSTSGGTAALGCLVKDYFPEPVTVSWNSGALTSGVHTFPAVLQSSGLYSLSSVVTVPSSSLGTQTYICNVNHKPSNTKVDKKVEPKSCDKTHTCPPCPAPELLGGPSVFLFPPKPKDTLMISRTPEVTCVVVDVSHEDPEVKFNWYVDGVEVHNAKTKPREEQYNSTYRVVSVLTVLHQDWLNGKEYKCKVSNWAVPAPIEKTISKAKGQPREPQVYTLPPSRDELTKNQVSLTCLVKGFYPSDIAVEWESNGQPENNYKTTPPVLDSDGSFFLYSKLTVDKSRWQQGNVFSCSVMHEALHNHYTQKSLSLSPGK

SEQ ID NO: 31 - DNA, 993 bp, Artificial Sequence
  Description of the artificial sequence: base sequence of IgG1_K326W/P329Y CH
gctagcaccaagggcccatcggtcttccccctggcaccctcctccaagagcacctctgggggcacagcggccctgggctgcctggtcaaggactacttccccgaaccggtgacggtgtcgtggaactcaggcgccctgaccagcggcgtgcacaccttcccggctgtcctacagtcctcaggactctactccctcagcagcgtggtgaccgtgccctccagcagcttgggcacccagacctacatctgcaacgtgaatcacaagcccagcaacaccaaggtggacaagaaagttgagcccaaatcttgtgacaaaactcacacatgcccaccgtgcccagcacctgaactcctggggggaccgtcagtcttcctcttccccccaaaacccaaggacaccctcatgatctcccggacccctgaggtcacatgcgtggtggtggacgtgagccacgaagaccctgaggtcaagttcaactggtacgtggacggcgtggaggtgcataatgccaagacaaagccgcgggaggagcagtacaacagcacgtaccgtgtggtcagcgtcctcaccgtcctgcaccaggactggctgaatggcaaggagtacaagtgcaaggtctccaactgggccctctacgcccccatcgagaaaaccatctccaaagccaaagggcagccccgagaaccacaggtgtacaccctgcccccatcccgggatgagctgaccaagaaccaggtcagcctgacctgcctggtcaaaggcttctatcccagcgacatcgccgtggagtgggagagcaatgggcagccggagaacaactacaagaccacgcctcccgtgctggactccgacggctccttcttcctctacagcaagctcaccgtggacaagagcaggtggcagcaggggaacgtcttctcatgctccgtgatgcatgaggctctgcacaaccactacacgcagaagagcctctccctgtctccgggtaaatga

SEQ ID NO: 32 - protein, 330 aa, Artificial Sequence
  Description of the artificial sequence: amino acid sequence of IgG1_K326W/P329Y CH
ASTKGPSVFPLAPSSKSTSGGTAALGCLVKDYFPEPVTVSWNSGALTSGVHTFPAVLQSSGLYSLSSVVTVPSSSLGTQTYICNVNHKPSNTKVDKKVEPKSCDKTHTCPPCPAPELLGGPSVFLFPPKPKDTLMISRTPEVTCVVVDVSHEDPEVKFNWYVDGVEVHNAKTKPREEQYNSTYRVVSVLTVLHQDWLNGKEYKCKVSNWALYAPIEKTISKAKGQPREPQVYTLPPSRDELTKNQVSLTCLVKGFYPSDIAVEWESNGQPENNYKTTPPVLDSDGSFFLYSKLTVDKSRWQQGNVFSCSVMHEALHNHYTQKSLSLSPGK

SEQ ID NO: 33 - DNA, 993 bp, Artificial Sequence
  Description of the artificial sequence: base sequence of IgG1_L328V/P329Y CH
gctagcaccaagggcccatcggtcttccccctggcaccctcctccaagagcacctctgggggcacagcggccctgggctgcctggtcaaggactacttccccgaaccggtgacggtgtcgtggaactcaggcgccctgaccagcggcgtgcacaccttcccggctgtcctacagtcctcaggactctactccctcagcagcgtggtgaccgtgccctccagcagcttgggcacccagacctacatctgcaacgtgaatcacaagcccagcaacaccaaggtggacaagaaagttgagcccaaatcttgtgacaaaactcacacatgcccaccgtgcccagcacctgaactcctggggggaccgtcagtcttcctcttccccccaaaacccaaggacaccctcatgatctcccggacccctgaggtcacatgcgtggtggtggacgtgagccacgaagaccctgaggtcaagttcaactggtacgtggacggcgtggaggtgcataatgccaagacaaagccgcgggaggagcagtacaacagcacgtaccgtgtggtcagcgtcctcaccgtcctgcaccaggactggctgaatggcaaggagtacaagtgcaaggtctccaacaaagccgtctacgcccccatcgagaaaaccatctccaaagccaaagggcagccccgagaaccacaggtgtacaccctgcccccatcccgggatgagctgaccaagaaccaggtcagcctgacctgcctggtcaaaggcttctatcccagcgacatcgccgtggagtgggagagcaatgggcagccggagaacaactacaagaccacgcctcccgtgctggactccgacggctccttcttcctctacagcaagctcaccgtggacaagagcaggtggcagcaggggaacgtcttctcatgctccgtgatgcatgaggctctgcacaaccactacacgcagaagagcctctccctgtctccgggtaaatga

SEQ ID NO: 34 - protein, 330 aa, Artificial Sequence
  Description of the artificial sequence: amino acid sequence of IgG1_L328V/P329Y CH
ASTKGPSVFPLAPSSKSTSGGTAALGCLVKDYFPEPVTVSWNSGALTSGVHTFPAVLQSSGLYSLSSVVTVPSSSLGTQTYICNVNHKPSNTKVDKKVEPKSCDKTHTCPPCPAPELLGGPSVFLFPPKPKDTLMISRTPEVTCVVVDVSHEDPEVKFNWYVDGVEVHNAKTKPREEQYNSTYRVVSVLTVLHQDWLNGKEYKCKVSNKAVYAPIEKTISKAKGQPREPQVYTLPPSRDELTKNQVSLTCLVKGFYPSDIAVEWESNGQPENNYKTTPPVLDSDGSFFLYSKLTVDKSRWQQGNVFSCSVMHEALHNHYTQKSLSLSPGK

SEQ ID NO: 35 - DNA, 993 bp, Artificial Sequence
  Description of the artificial sequence: base sequence of IgG1_K326W/L328V/P329Y CH
gctagcaccaagggcccatcggtcttccccctggcaccctcctccaagagcacctctgggggcacagcggccctgggctgcctggtcaaggactacttccccgaaccggtgacggtgtcgtggaactcaggcgccctgaccagcggcgtgcacaccttcccggctgtcctacagtcctcaggactctactccctcagcagcgtggtgaccgtgccctccagcagcttgggcacccagacctacatctgcaacgtgaatcacaagcccagcaacaccaaggtggacaagaaagttgagcccaaatcttgtgacaaaactcacacatgcccaccgtgcccagcacctgaactcctggggggaccgtcagtcttcctcttccccccaaaacccaaggacaccctcatgatctcccggacccctgaggtcacatgcgtggtggtggacgtgagccacgaagaccctgaggtcaagttcaactggtacgtggacggcgtggaggtgcataatgccaagacaaagccgcgggaggagcagtacaacagcacgtaccgtgtggtcagcgtcctcaccgtcctgcaccaggactggctgaatggcaaggagtacaagtgcaaggtctccaactgggccgtctacgcccccatcgagaaaaccatctccaaagccaaagggcagccccgagaaccacaggtgtacaccctgcccccatcccgggatgagctgaccaagaaccaggtcagcctgacctgcctggtcaaaggcttctatcccagcgacatcgccgtggagtgggagagcaatgggcagccggagaacaactacaagaccacgcctcccgtgctggactccgacggctccttcttcctctacagcaagctcaccgtggacaagagcaggtggcagcaggggaacgtcttctcatgctccgtgatgcatgaggctctgcacaaccactacacgcagaagagcctctccctgtctccgggtaaatga

SEQ ID NO: 36 - protein, 330 aa, Artificial Sequence
  Description of the artificial sequence: amino acid sequence of IgG1_K326W/L328V/P329Y CH
ASTKGPSVFPLAPSSKSTSGGTAALGCLVKDYFPEPVTVSWNSGALTSGVHTFPAVLQSSGLYSLSSVVTVPSSSLGTQTYICNVNHKPSNTKVDKKVEPKSCDKTHTCPPCPAPELLGGPSVFLFPPKPKDTLMISRTPEVTCVVVDVSHEDPEVKFNWYVDGVEVHNAKTKPREEQYNSTYRVVSVLTVLHQDWLNGKEYKCKVSNWAVYAPIEKTISKAKGQPREPQVYTLPPSRDELTKNQVSLTCLVKGFYPSDIAVEWESNGQPENNYKTTPPVLDSDGSFFLYSKLTVDKSRWQQGNVFSCSVMHEALHNHYTQKSLSLSPGK

SEQ ID NO: 37 - DNA, 993 bp, Artificial Sequence
  Description of the artificial sequence: base sequence of IgG1114_AA_AAA_D265A CH
gctagcaccaagggcccatcggtcttccccctggcaccctcctccaagagcacctctgggggcacagcggccctgggctgcctggtcaaggactacttccccgaaccggtgacggtgtcgtggaactcaggcgccctgaccagcggcgtgcacaccttcccggctgtcctacagtcctcaggactctactccctcagcagcgtggtgaccgtgccctccagcagcttgggcacccagacctacatctgcaacgtgaatcacaagcccagcaacaccaaggtggacaagaaagttgagcccaaatcttgtgacaaaactcacacagcgccaccggcgccagcacctgaactcctggggggaccgtcagtcttcctcttccccccaaaacccaaggacaccctcatgatctcccggacccctgaggtcacatgcgtggtggtggccgtgagccacgaagaccctgaggtcaagttcaactggtacgtggacggcgtggaggtgcataatgccaagacaaagccgcgggaggagcagtacaacgccacgtaccgtgtggtcagcgtcctcaccgtcctgcaccaggactggctgaatggcaaggagtacaagtgcaaggtctccaacaaagccctcccagcccccatcgcggcaaccatctccaaagccaaagggcagccccgagagccacaggtgtacaccctgcccccatcccaggaggagatgaccaagaaccaggtcagcctgacctgcctggtcaaaggcttctaccccagcgacatcgccgtggagtgggagagcaatgggcagccggagaacaactacaagaccacgcctcccgtgctggactccgacggctccttcttcctctacagcaggctaaccgtggacaagagcaggtggcaggaggggaatgtcttctcatgctccgtgatgcatgaggctctgcacaaccactacacacagaagagcctctccctgtctctgggtaaatga

SEQ ID NO: 38 - protein, 330 aa, Artificial Sequence
  Description of the artificial sequence: amino acid sequence of IgG1114_AA_AAA_D265A CH
ASTKGPSVFPLAPSSKSTSGGTAALGCLVKDYFPEPVTVSWNSGALTSGVHTFPAVLQSSGLYSLSSVVTVPSSSLGTQTYICNVNHKPSNTKVDKKVEPKSCDKTHTAPPAPAPELLGGPSVFLFPPKPKDTLMISRTPEVTCVVVAVSHEDPEVKFNWYVDGVEVHNAKTKPREEQYNATYRVVSVLTVLHQDWLNGKEYKCKVSNKALPAPIAATISKAKGQPREPQVYTLPPSQEEMTKNQVSLTCLVKGFYPSDIAVEWESNGQPENNYKTTPPVLDSDGSFFLYSRLTVDKSRWQEGNVFSCSVMHEALHNHYTQKSLSLSLGK

SEQ ID NO: 39 - DNA, 993 bp, Artificial Sequence
  Description of the artificial sequence: base sequence of IgG1114_AA_AAA_P329Y CH
gctagcaccaagggcccatcggtcttccccctggcaccctcctccaagagcacctctgggggcacagcggccctgggctgcctggtcaaggactacttccccgaaccggtgacggtgtcgtggaactcaggcgccctgaccagcggcgtgcacaccttcccggctgtcctacagtcctcaggactctactccctcagcagcgtggtgaccgtgccctccagcagcttgggcacccagacctacatctgcaacgtgaatcacaagcccagcaacaccaaggtggacaagaaagttgagcccaaatcttgtgacaaaactcacacagcgccaccggcgccagcacctgaactcctggggggaccgtcagtcttcctcttccccccaaaacccaaggacaccctcatgatctcccggacccctgaggtcacatgcgtggtggtggacgtgagccacgaagaccctgaggtcaagttcaactggtacgtggacggcgtggaggtgcataatgccaagacaaagccgcgggaggagcagtacaacgccacgtaccgtgtggtcagcgtcctcaccgtcctgcaccaggactggctgaatggcaaggagtacaagtgcaaggtctccaacaaagccctctacgcccccatcgcggcaaccatctccaaagccaaagggcagccccgagagccacaggtgtacaccctgcccccatcccaggaggagatgaccaagaaccaggtcagcctgacctgcctggtcaaaggcttctaccccagcgacatcgccgtggagtgggagagcaatgggcagccggagaacaactacaagaccacgcctcccgtgctggactccgacggctccttcttcctctacagcaggctaaccgtggacaagagcaggtggcaggaggggaatgtcttctcatgctccgtgatgcatgaggctctgcacaaccactacacacagaagagcctctccctgtctctgggtaaatga

SEQ ID NO: 40 - protein, 330 aa, Artificial Sequence
  Description of the artificial sequence: amino acid sequence of IgG1114_AA_AAA_P329Y CH
ASTKGPSVFPLAPSSKSTSGGTAALGCLVKDYFPEPVTVSWNSGALTSGVHTFPAVLQSSGLYSLSSVVTVPSSSLGTQTYICNVNHKPSNTKVDKKVEPKSCDKTHTAPPAPAPELLGGPSVFLFPPKPKDTLMISRTPEVTCVVVDVSHEDPEVKFNWYVDGVEVHNAKTKPREEQYNATYRVVSVLTVLHQDWLNGKEYKCKVSNKALYAPIAATISKAKGQPREPQVYTLPPSQEEMTKNQVSLTCLVKGFYPSDIAVEWESNGQPENNYKTTPPVLDSDGSFFLYSRLTVDKSRWQEGNVFSCSVMHEALHNHYTQKSLSLSLGK

SEQ ID NO: 41 - DNA, 336 bp, Artificial Sequence
  Description of the artificial sequence: base sequence of CD4 (ibalizumab) VL
gacatcgtgatgacccagtcccctgactccctggctgtgtccctgggcgagcgcgtgaccatgaactgcaagtcctcccagtccctgctgtactccaccaaccagaagaactacctggcttggtaccagcagaagcctggccagtcccctaagctgctgatctactgggcttccacccgcgagtccggcgtgcctgaccgcttctccggctccggctccggcaccgacttcaccctgaccatctcctccgtgcaggctgaggacgtggctgtgtactactgccagcagtactactcctaccgcaccttcggcggcggcaccaagctggagatcaag

SEQ ID NO: 42 - protein, 112 aa, Artificial Sequence
  Description of the artificial sequence: amino acid sequence of CD4 (ibalizumab) VL
DIVMTQSPDSLAVSLGERVTMNCKSSQSLLYSTNQKNYLAWYQQKPGQSPKLLIYWASTRESGVPDRFSGSGSGTDFTLTISSVQAEDVAVYYCQQYYSYRTFGGGTKLEIK

SEQ ID NO: 43 - DNA, 366 bp, Artificial Sequence
  Description of the artificial sequence: base sequence of CD4 (ibalizumab) VH
caggtgcagctgcagcagtccggccctgaggtggtgaagcctggcgcttccgtgaagatgtcctgcaaggcttccggctacaccttcacctcctacgtgatccactgggtgcgccagaagcctggccagggcctggactggatcggctacatcaacccttacaacgacggcaccgactacgacgagaagttcaagggcaaggctaccctgacctccgacacctccacctccaccgcttacatggagctgtcctccctgcgctccgaggacaccgctgtgtactactgcgctcgcgagaaggacaactacgctaccggcgcttggttcgcttactggggccagggcaccctggtgaccgtgtcctcc

SEQ ID NO: 44 - protein, 122 aa, Artificial Sequence
  Description of the artificial sequence: amino acid sequence of CD4 (ibalizumab) VH
QVQLQQSGPEVVKPGASVKMSCKASGYTFTSYVIHWVRQKPGQGLDWIGYINPYNDGTDYDEKFKGKATLTSDTSTSTAYMELSSLRSEDTAVYYCAREKDNYATGAWFAYWGQGTLVTVSS

SEQ ID NO: 45 - DNA, 321 bp, Artificial Sequence
  Description of the artificial sequence: base sequence of CD70 (2H5) VL
gaaattgtgttgacacagtctccagccaccctgtctttgtctccaggggaaagagccaccctctcctgcagggccagtcagagtgttagcagctacttagcctggtaccaacagaaacctggccaggctcccaggctcctcatctatgatgcatccaacagggccactggcatcccagccaggttcagtggcagtgggtctgggacagacttcactctcaccatcagcagcctagagcctgaagattttgcagtttattactgtcagcagcgtaccaactggccgctcactttcggcggagggaccaaggtggagatcaaa

SEQ ID NO: 46 - protein, 107 aa, Artificial Sequence
  Description of the artificial sequence: amino acid sequence of CD70 (2H5) VL
EIVLTQSPATLSLSPGERATLSCRASQSVSSYLAWYQQKPGQAPRLLIYDASNRATGIPARFSGSGSGTDFTLTISSLEPEDFAVYYCQQRTNWPLTFGGGTKVEIK

SEQ ID NO: 47 - DNA, 354 bp, Artificial Sequence
  Description of the artificial sequence: base sequence of CD70 (2H5) VH
caggtgcagctggtggagtctgggggaggcgtggtccagcctgggaggtccctgagactctcctgtgcagcctctggatttaccttcagtagctatattatgcactgggtccgccaggctccaggcaaggggctggagtgggtggcagttatatcatatgatggaagaaacaaatactacgcagactccgtgaagggccgattcaccatctccagagacaattccaagaacacgctgtatctgcaaatgaacagcctgagagctgaggacacggctgtgtattactgtgcgagagatacggatggctacgattttgactactggggccagggaaccctggtcaccgtctcctca

SEQ ID NO: 48 - protein, 118 aa, Artificial Sequence
  Description of the artificial sequence: amino acid sequence of CD70 (2H5) VH
QVQLVESGGGVVQPGRSLRLSCAASGFTFSSYIMHWVRQAPGKGLEWVAVISYDGRNKYYADSVKGRFTISRDNSKNTLYLQMNSLRAEDTAVYYCARDTDGYDFDYWGQGTLVTVSS

SEQ ID NO: 49 - DNA, 993 bp, Artificial Sequence
  Description of the artificial sequence: base sequence of IgG1114_AA_AAA_D265E CH
gctagcaccaagggcccatcggtcttccccctggcaccctcctccaagagcacctctgggggcacagcggccctgggctgcctggtcaaggactacttccccgaaccggtgacggtgtcgtggaactcaggcgccctgaccagcggcgtgcacaccttcccggctgtcctacagtcctcaggactctactccctcagcagcgtggtgaccgtgccctccagcagcttgggcacccagacctacatctgcaacgtgaatcacaagcccagcaacaccaaggtggacaagaaagttgagcccaaatcttgtgacaaaactcacacagcgccaccggcgccagcacctgaactcctggggggaccgtcagtcttcctcttccccccaaaacccaaggacaccctcatgatctcccggacccctgaggtcacatgcgtggtggtggaggtgagccacgaagaccctgaggtcaagttcaactggtacgtggacggcgtggaggtgcataatgccaagacaaagccgcgggaggagcagtacaacgccacgtaccgtgtggtcagcgtcctcaccgtcctgcaccaggactggctgaatggcaaggagtacaagtgcaaggtctccaacaaagccctcccagcccccatcgcggcaaccatctccaaagccaaagggcagccccgagagccacaggtgtacaccctgcccccatcccaggaggagatgaccaagaaccaggtcagcctgacctgcctggtcaaaggcttctaccccagcgacatcgccgtggagtgggagagcaatgggcagccggagaacaactacaagaccacgcctcccgtgctggactccgacggctccttcttcctctacagcaggctaaccgtggacaagagcaggtggcaggaggggaatgtcttctcatgctccgtgatgcatgaggctctgcacaaccactacacacagaagagcctctccctgtctctgggtaaatga

SEQ ID NO: 50 - protein, 330 aa, Artificial Sequence
  Description of the artificial sequence: amino acid sequence of IgG1114_AA_AAA_S239R CH
ASTKGPSVFPLAPSSKSTSGGTAALGCLVKDYFPEPVTVSWNSGALTSGVHTFPAVLQSSGLYSLSSVVTVPSSSLGTQTYICNVNHKPSNTKVDKKVEPKSCDKTHTAPPAPAPELLGGPRVFLFPPKPKDTLMISRTPEVTCVVVDVSHEDPEVKFNWYVDGVEVHNAKTKPREEQYNATYRVVSVLTVLHQDWLNGKEYKCKVSNKALPAPIAATISKAKGQPREPQVYTLPPSQEEMTKNQVSLTCLVKGFYPSDIAVEWESNGQPENNYKTTPPVLDSDGSFFLYSRLTVDKSRWQEGNVFSCSVMHEALHNHYTQKSLSLSLGK

SEQ ID NO: 51 - DNA, 993 bp, Artificial Sequence
  Description of the artificial sequence: base sequence of IgG1114_AA_AAA_D265N CH
gctagcaccaagggcccatcggtcttccccctggcaccctcctccaagagcacctctgggggcacagcggccctgggctgcctggtcaaggactacttccccgaaccggtgacggtgtcgtggaactcaggcgccctgaccagcggcgtgcacaccttcccggctgtcctacagtcctcaggactctactccctcagcagcgtggtgaccgtgccctccagcagcttgggcacccagacctacatctgcaacgtgaatcacaagcccagcaacaccaaggtggacaagaaagttgagcccaaatcttgtgacaaaactcacacagcgccaccggcgccagcacctgaactcctggggggaccgtcagtcttcctcttccccccaaaacccaaggacaccctcatgatctcccggacccctgaggtcacatgcgtggtggtgaacgtgagccacgaagaccctgaggtcaagttcaactggtacgtggacggcgtggaggtgcataatgccaagacaaagccgcgggaggagcagtacaacgccacgtaccgtgtggtcagcgtcctcaccgtcctgcaccaggactggctgaatggcaaggagtacaagtgcaaggtctccaacaaagccctcccagcccccatcgcggcaaccatctccaaagccaaagggcagccccgagagccacaggtgtacaccctgcccccatcccaggaggagatgaccaagaaccaggtcagcctgacctgcctggtcaaaggcttctaccccagcgacatcgccgtggagtgggagagcaatgggcagccggagaacaactacaagaccacgcctcccgtgctggactccgacggctccttcttcctctacagcaggctaaccgtggacaagagcaggtggcaggaggggaatgtcttctcatgctccgtgatgcatgaggctctgcacaaccactacacacagaagagcctctccctgtctctgggtaaatga

SEQ ID NO: 52 - protein, 330 aa, Artificial Sequence
  Description of the artificial sequence: amino acid sequence of IgG1114_AA_AAA_D265N CH
ASTKGPSVFPLAPSSKSTSGGTAALGCLVKDYFPEPVTVSWNSGALTSGVHTFPAVLQSSGLYSLSSVVTVPSSSLGTQTYICNVNHKPSNTKVDKKVEPKSCDKTHTAPPAPAPELLGGPSVFLFPPKPKDTLMISRTPEVTCVVVNVSHEDPEVKFNWYVDGVEVHNAKTKPREEQYNATYRVVSVLTVLHQDWLNGKEYKCKVSNKALPAPIAATISKAKGQPREPQVYTLPPSQEEMTKNQVSLTCLVKGFYPSDIAVEWESNGQPENNYKTTPPVLDSDGSFFLYSRLTVDKSRWQEGNVFSCSVMHEALHNHYTQKSLSLSLGK

SEQ ID NO: 53 - DNA, 993 bp, Artificial Sequence; identical to SEQ ID NO: 49
  Description of the artificial sequence: base sequence of IgG1114_AA_AAA_D265E CH

SEQ ID NO: 54 - protein, 330 aa, Artificial Sequence
  Description of the artificial sequence: amino acid sequence of IgG1114_AA_AAA_D265E CH
ASTKGPSVFPLAPSSKSTSGGTAALGCLVKDYFPEPVTVSWNSGALTSGVHTFPAVLQSSGLYSLSSVVTVPSSSLGTQTYICNVNHKPSNTKVDKKVEPKSCDKTHTAPPAPAPELLGGPSVFLFPPKPKDTLMISRTPEVTCVVVEVSHEDPEVKFNWYVDGVEVHNAKTKPREEQYNATYRVVSVLTVLHQDWLNGKEYKCKVSNKALPAPIAATISKAKGQPREPQVYTLPPSQEEMTKNQVSLTCLVKGFYPSDIAVEWESNGQPENNYKTTPPVLDSDGSFFLYSRLTVDKSRWQEGNVFSCSVMHEALHNHYTQKSLSLSLGK

SEQ ID NO: 55 - DNA, 993 bp, Artificial Sequence
  Description of the artificial sequence: base sequence of IgG1114_AA_AAA_S267K CH
gctagcaccaagggcccatcggtcttccccctggcaccctcctccaagagcacctctgggggcacagcggccctgggctgcctggtcaaggactacttccccgaaccggtgacggtgtcgtggaactcaggcgccctgaccagcggcgtgcacaccttcccggctgtcctacagtcctcaggactctactccctcagcagcgtggtgaccgtgccctccagcagcttgggcacccagacctacatctgcaacgtgaatcacaagcccagcaacaccaaggtggacaagaaagttgagcccaaatcttgtgacaaaactcacacagcgccaccggcgccagcacctgaactcctggggggaccgtcagtcttcctcttccccccaaaacccaaggacaccctcatgatctcccggacccctgaggtcacatgcgtggtggtggacgtgaagcacgaagaccctgaggtcaagttcaactggtacgtggacggcgtggaggtgcataatgccaagacaaagccgcgggaggagcagtacaacgccacgtaccgtgtggtcagcgtcctcaccgtcctgcaccaggactggctgaatggcaaggagtacaagtgcaaggtctccaacaaagccctcccagcccccatcgcggcaaccatctccaaagccaaagggcagccccgagagccacaggtgtacaccctgcccccatcccaggaggagatgaccaagaaccaggtcagcctgacctgcctggtcaaaggcttctaccccagcgacatcgccgtggagtgggagagcaatgggcagccggagaacaactacaagaccacgcctcccgtgctggactccgacggctccttcttcctctacagcaggctaaccgtggacaagagcaggtggcaggaggggaatgtcttctcatgctccgtgatgcatgaggctctgcacaaccactacacacagaagagcctctccctgtctctgggtaaatga

SEQ ID NO: 56 - protein, 330 aa, Artificial Sequence
  Description of the artificial sequence: amino acid sequence of IgG1114_AA_AAA_S267K CH
ASTKGPSVFPLAPSSKSTSGGTAALGCLVKDYFPEPVTVSWNSGALTSGVHTFPAVLQSSGLYSLSSVVTVPSSSLGTQTYICNVNHKPSNTKVDKKVEPKSCDKTHTAPPAPAPELLGGPSVFLFPPKPKDTLMISRTPEVTCVVVDVKHEDPEVKFNWYVDGVEVHNAKTKPREEQYNATYRVVSVLTVLHQDWLNGKEYKCKVSNKALPAPIAATISKAKGQPREPQVYTLPPSQEEMTKNQVSLTCLVKGFYPSDIAVEWESNGQPENNYKTTPPVLDSDGSFFLYSRLTVDKSRWQEGNVFSCSVMHEALHNHYTQKSLSLSLGK

SEQ ID NO: 57 - DNA, 993 bp, Artificial Sequence
  Description of the artificial sequence: base sequence of IgG1114_AA_AAA_E269P CH
gctagcaccaagggcccatcggtcttccccctggcaccctcctccaagagcacctctgggggcacagcggccctgggctgcctggtcaaggactacttccccgaaccggtgacggtgtcgtggaactcaggcgccctgaccagcggcgtgcacaccttcccggctgtcctacagtcctcaggactctactccctcagcagcgtggtgaccgtgccctccagcagcttgggcacccagacctacatctgcaacgtgaatcacaagcccagcaacaccaaggtggacaagaaagttgagcccaaatcttgtgacaaaactcacacagcgccaccggcgccagcacctgaactcctggggggaccgtcagtcttcctcttccccccaaaacccaaggacaccctcatgatctcccggacccctgaggtcacatgcgtggtggtggacgtgagccacccagaccctgaggtcaagttcaactggtacgtggacggcgtggaggtgcataatgccaagacaaagccgcgggaggagcagtacaacgccacgtaccgtgtggtcagcgtcctcaccgtcctgcaccaggactggctgaatggcaaggagtacaagtgcaaggtctccaacaaagccctcccagcccccatcgcggcaaccatctccaaagccaaagggcagccccgagagccacaggtgtacaccctgcccccatcccaggaggagatgaccaagaaccaggtcagcctgacctgcctggtcaaaggcttctaccccagcgacatcgccgtggagtgggagagcaatgggcagccggagaacaactacaagaccacgcctcccgtgctggactccgacggctccttcttcctctacagcaggctaaccgtggacaagagcaggtggcaggaggggaatgtcttctcatgctccgtgatgcatgaggctctgcacaaccactacacacagaagagcctctccctgtctctgggtaaatga

SEQ ID NO: 58 - protein, 330 aa, Artificial Sequence
  Description of the artificial sequence: amino acid sequence of IgG1114_AA_AAA_E269P CH
ASTKGPSVFPLAPSSKSTSGGTAALGCLVKDYFPEPVTVSWNSGALTSGVHTFPAVLQSSGLYSLSSVVTVPSSSLGTQTYICNVNHKPSNTKVDKKVEPKSCDKTHTAPPAPAPELLGGPSVFLFPPKPKDTLMISRTPEVTCVVVDVSHPDPEVKFNWYVDGVEVHNAKTKPREEQYNATYRVVSVLTVLHQDWLNGKEYKCKVSNKALPAPIAATISKAKGQPREPQVYTLPPSQEEMTKNQVSLTCLVKGFYPSDIAVEWESNGQPENNYKTTPPVLDSDGSFFLYSRLTVDKSRWQEGNVFSCSVMHEALHNHYTQKSLSLSLGK

SEQ ID NO: 59 - DNA, 993 bp, Artificial Sequence
  Description of the artificial sequence: base sequence of IgG1114_AA_AAA_Y296P CH
gctagcaccaagggcccatcggtcttccccctggcaccctcctccaagagcacctctgggggcacagcggccctgggctgcctggtcaaggactacttccccgaaccggtgacggtgtcgtggaactcaggcgccctgaccagcggcgtgcacaccttcccggctgtcctacagtcctcaggactctactccctcagcagcgtggtgaccgtgccctccagcagcttgggcacccagacctacatctgcaacgtgaatcacaagcccagcaacaccaaggtggacaagaaagttgagcccaaatcttgtgacaaaactcacacagcgccaccggcgccagcacctgaactcctggggggaccgtcagtcttcctcttccccccaaaacccaaggacaccctcatgatctcccggacccctgaggtcacatgcgtggtggtggacgtgagccacgaagaccctgaggtcaagttcaactggtacgtggacggcgtggaggtgcataatgccaagacaaagccgcgggaggagcagccaaacgccacgtaccgtgtggtcagcgtcctcaccgtcctgcaccaggactggctgaatggcaaggagtacaagtgcaaggtctccaacaaagccctcccagcccccatcgcggcaaccatctccaaagccaaagggcagccccgagagccacaggtgtacaccctgcccccatcccaggaggagatgaccaagaaccaggtcagcctgacctgcctggtcaaaggcttctaccccagcgacatcgccgtggagtgggagagcaatgggcagccggagaacaactacaagaccacgcctcccgtgctggactccgacggctccttcttcctctacagcaggctaaccgtggacaagagcaggtggcaggaggggaatgtcttctcatgctccgtgatgcatgaggctctgcacaaccactacacacagaagagcctctccctgtctctgggtaaatga

SEQ ID NO: 60 - protein, 330 aa, Artificial Sequence
  Description of the artificial sequence: amino acid sequence of IgG1114_AA_AAA_Y296P CH
ASTKGPSVFPLAPSSKSTSGGTAALGCLVKDYFPEPVTVSWNSGALTSGVHTFPAVLQSSGLYSLSSVVTVPSSSLGTQTYICNVNHKPSNTKVDKKVEPKSCDKTHTAPPAPAPELLGGPSVFLFPPKPKDTLMISRTPEVTCVVVDVSHEDPEVKFNWYVDGVEVHNAKTKPREEQPNATYRVVSVLTVLHQDWLNGKEYKCKVSNKALPAPIAATISKAKGQPREPQVYTLPPSQEEMTKNQVSLTCLVKGFYPSDIAVEWESNGQPENNYKTTPPVLDSDGSFFLYSRLTVDKSRWQEGNVFSCSVMHEALHNHYTQKSLSLSLGK

SEQ ID NO: 61 - DNA, 993 bp, Artificial Sequence
  Description of the artificial sequence: base sequence of IgG1114_AA_AAA_S298E CH
gctagcaccaagggcccatcggtcttccccctggcaccctcctccaagagcacctctgggggcacagcggccctgggctgcctggtcaaggactacttccccgaaccggtgacggtgtcgtggaactcaggcgccctgaccagcggcgtgcacaccttcccggctgtcctacagtcctcaggactctactccctcagcagcgtggtgaccgtgccctccagcagcttgggcacccagacctacatctgcaacgtgaatcacaagcccagcaacaccaaggtggacaagaaagttgagcccaaatcttgtgacaaaactcacacagcgccaccggcgccagcacctgaactcctggggggaccgtcagtcttcctcttccccccaaaacccaaggacaccctcatgatctcccggacccctgaggtcacatgcgtggtggtggacgtgagccacgaagaccctgaggtcaagttcaactggtacgtggacggcgtggaggtgcataatgccaagacaaagccgcgggaggagcagtacaacgagacgtaccgtgtggtcagcgtcctcaccgtcctgcaccaggactggctgaatggcaaggagtacaagtgcaaggtctccaacaaagccctcccagcccccatcgcggcaaccatctccaaagccaaagggcagccccgagagccacaggtgtacaccctgcccccatcccaggaggagatgaccaagaaccaggtcagcctgacctgcctggtcaaaggcttctaccccagcgacatcgccgtggagtgggagagcaatgggcagccggagaacaactacaagaccacgcctcccgtgctggactccgacggctccttcttcctctacagcaggctaaccgtggacaagagcaggtggcaggaggggaatgtcttctcatgctccgtgatgcatgaggctctgcacaaccactacacacagaagagcctctccctgtctctgggtaaatga

SEQ ID NO: 62 - protein, 330 aa, Artificial Sequence
  Description of the artificial sequence: amino acid sequence of IgG1114_AA_AAA_S298E CH
ASTKGPSVFPLAPSSKSTSGGTAALGCLVKDYFPEPVTVSWNSGALTSGVHTFPAVLQSSGLYSLSSVVTVPSSSLGTQTYICNVNHKPSNTKVDKKVEPKSCDKTHTAPPAPAPELLGGPSVFLFPPKPKDTLMISRTPEVTCVVVDVSHEDPEVKFNWYVDGVEVHNAKTKPREEQYNETYRVVSVLTVLHQDWLNGKEYKCKVSNKALPAPIAATISKAKGQPREPQVYTLPPSQEEMTKNQVSLTCLVKGFYPSDIAVEWESNGQPENNYKTTPPVLDSDGSFFLYSRLTVDKSRWQEGNVFSCSVMHEALHNHYTQKSLSLSLGK

SEQ ID NO: 63 - DNA, 993 bp, Artificial Sequence
  Description of the artificial sequence: base sequence of IgG1114_AA_AAA_T299A CH
gctagcaccaagggcccatcggtcttccccctggcaccctcctccaagagcacctctgggggcacagcggccctgggctgcctggtcaaggactacttccccgaaccggtgacggtgtcgtggaactcaggcgccctgaccagcggcgtgcacaccttcccggctgtcctacagtcctcaggactctactccctcagcagcgtggtgaccgtgccctccagcagcttgggcacccagacctacatctgcaacgtgaatcacaagcccagcaacaccaaggtggacaagaaagttgagcccaaatcttgtgacaaaactcacacagcgccaccggcgccagcacctgaactcctggggggaccgtcagtcttcctcttccccccaaaacccaaggacaccctcatgatctcccggacccctgaggtcacatgcgtggtggtggacgtgagccacgaagaccctgaggtcaagttcaactggtacgtggacggcgtggaggtgcataatgccaagacaaagccgcgggaggagcagtacaacgccgcataccgtgtggtcagcgtcctcaccgtcctgcaccaggactggctgaatggcaaggagtacaagtgcaaggtctccaacaaagccctcccagcccccatcgcggcaaccatctccaaagccaaagggcagccccgagagccacaggtgtacaccctgcccccatcccaggaggagatgaccaagaaccaggtcagcctgacctgcctggtcaaaggcttctaccccagcgacatcgccgtggagtgggagagcaatgggcagccggagaacaactacaagaccacgcctcccgtgctggactccgacggctccttcttcctctacagcaggctaaccgtggacaagagcaggtggcaggaggggaatgtcttctcatgctccgtgatgcatgaggctctgcacaaccactacacacagaagagcctctccctgtctctgggtaaatga

SEQ ID NO: 64 - protein, 330 aa, Artificial Sequence
  Description of the artificial sequence: amino acid sequence of IgG1114_AA_AAA_T299A CH
ASTKGPSVFPLAPSSKSTSGGTAALGCLVKDYFPEPVTVSWNSGALTSGVHTFPAVLQSSGLYSLSSVVTVPSSSLGTQTYICNVNHKPSNTKVDKKVEPKSCDKTHTAPPAPAPELLGGPSVFLFPPKPKDTLMISRTPEVTCVVVDVSHEDPEVKFNWYVDGVEVHNAKTKPREEQYNAAYRVVSVLTVLHQDWLNGKEYKCKVSNKALPAPIAATISKAKGQPREPQVYTLPPSQEEMTKNQVSLTCLVKGFYPSDIAVEWESNGQPENNYKTTPPVLDSDGSFFLYSRLTVDKSRWQEGNVFSCSVMHEALHNHYTQKSLSLSLGK

SEQ ID NO: 65 - DNA, 993 bp, Artificial Sequence
  Description of the artificial sequence: base sequence of IgG1114_AA_AAA_L235R CH
gctagcaccaagggcccatcggtcttccccctggcaccctcctccaagagcacctctgggggcacagcggccctgggctgcctggtcaaggactacttccccgaaccggtgacggtgtcgtggaactcaggcgccctgaccagcggcgtgcacaccttcccggctgtcctacagtcctcaggactctactccctcagcagcgtggtgaccgtgccctccagcagcttgggcacccagacctacatctgcaacgtgaatcacaagcccagcaacaccaaggtggacaagaaagttgagcccaaatcttgtgacaaaactcacacagcgccaccggcgccagcacctgaactccgggggggaccgtcagtcttcctcttccccccaaaacccaaggacaccctcatgatctcccggacccctgaggtcacatgcgtggtggtggacgtgagccacgaagaccctgaggtcaagttcaactggtacgtggacggcgtggaggtgcataatgccaagacaaagccgcgggaggagcagtacaacgccacgtaccgtgtggtcagcgtcctcaccgtcctgcaccaggactggctgaatggcaaggagtacaagtgcaaggtctccaacaaagccctcccagcccccatcgcggcaaccatctccaaagccaaagggcagccccgagagccacaggtgtacaccctgcccccatcccaggaggagatgaccaagaaccaggtcagcctgacctgcctggtcaaaggcttctaccccagcgacatcgccgtggagtgggagagcaatgggcagccggagaacaactacaagaccacgcctcccgtgctggactccgacggctccttcttcctctacagcaggctaaccgtggacaagagcaggtggcaggaggggaatgtcttctcatgctccgtgatgcatgaggctctgcacaaccactacacacagaagagcctctccctgtctctgggtaaatga

SEQ ID NO: 66 - protein, 330 aa, Artificial Sequence
  IgG1114_AA_AAA_L235R CH
ASTKGPSVFPLAPSSKSTSGGTAALGCLVKDYFPEPVTVSWNSGALTSGVHTFPAVLQSSGLYSLSSVVTVPSSSLGTQTYICNVNHKPSNTKVDKKVEPKSCDKTHTAPPAPAPELRGGPSVFLFPPKPKDTLMISRTPEVTCVVVDVSHEDPEVKFNWYVDGVEVHNAKTKPREEQYNATYRVVSVLTVLHQDWLNGKEYKCKVSNKALPAPIAATISKAKGQPREPQVYTLPPSQEEMTKNQVSLTCLVKGFYPSDIAVEWESNGQPENNYKTTPPVLDSDGSFFLYSRLTVDKSRWQEGNVFSCSVMHEALHNHYTQKSLSLSLGK

SEQ ID NO: 67 - DNA, 993 bp, Artificial Sequence
  Description of the artificial sequence: base sequence of IgG1114_AA_AAA_A327I CH
gctagcaccaagggcccatcggtcttccccctggcaccctcctccaagagcacctctgggggcacagcggccctgggctgcctggtcaaggactacttccccgaaccggtgacggtgtcgtggaactcaggcgccctgaccagcggcgtgcacaccttcccggctgtcctacagtcctcaggactctactccctcagcagcgtggtgaccgtgccctccagcagcttgggcacccagacctacatctgcaacgtgaatcacaagcccagcaacaccaaggtggacaagaaagttgagcccaaatcttgtgacaaaactcacacagcgccaccggcgccagcacctgaactcctggggggaccgtcagtcttcctcttccccccaaaacccaaggacaccctcatgatctcccggacccctgaggtcacatgcgtggtggtggacgtgagccacgaagaccctgaggtcaagttcaactggtacgtggacggcgtggaggtgcataatgccaagacaaagccgcgggaggagcagtacaacgccacgtaccgtgtggtcagcgtcctcaccgtcctgcaccaggactggctgaatggcaaggagtacaagtgcaaggtctccaacaaaatcctcccagcccccatcgcggcaaccatctccaaagccaaagggcagccccgagagccacaggtgtacaccctgcccccatcccaggaggagatgaccaagaaccaggtcagcctgacctgcctggtcaaaggcttctaccccagcgacatcgccgtggagtgggagagcaatgggcagccggagaacaactacaagaccacgcctcccgtgctggactccgacggctccttcttcctctacagcaggctaaccgtggacaagagcaggtggcaggaggggaatgtcttctcatgctccgtgatgcatgaggctctgcacaaccactacacacagaagagcctctccctgtctctgggtaaatga

SEQ ID NO: 68 - protein, 330 aa, Artificial Sequence
  Description of the artificial sequence: amino acid sequence of IgG1114_AA_AAA_A327I CH
ASTKGPSVFPLAPSSKSTSGGTAALGCLVKDYFPEPVTVSWNSGALTSGVHTFPAVLQSSGLYSLSSVVTVPSSSLGTQTYICNVNHKPSNTKVDKKVEPKSCDKTHTAPPAPAPELLGGPSVFLFPPKPKDTLMISRTPEVTCVVVDVSHEDPEVKFNWYVDGVEVHNAKTKPREEQYNATYRVVSVLTVLHQDWLNGKEYKCKVSNKILPAPIAATISKAKGQPREPQVYTLPPSQEEMTKNQVSLTCLVKGFYPSDIAVEWESNGQPENNYKTTPPVLDSDGSFFLYSRLTVDKSRWQEGNVFSCSVMHEALHNHYTQKSLSLSLGK

SEQ ID NO: 69 - DNA, 993 bp, Artificial Sequence
  Description of the artificial sequence: base sequence of IgG1114_AA_AAA_K326G CH
gctagcaccaagggcccatcggtcttccccctggcaccctcctccaagagcacctctgggggcacagcggccctgggctgcctggtcaaggactacttccccgaaccggtgacggtgtcgtggaactcaggcgccctgaccagcggcgtgcacaccttcccggctgtcctacagtcctcaggactctactccctcagcagcgtggtgaccgtgccctccagcagcttgggcacccagacctacatctgcaacgtgaatcacaagcccagcaacaccaaggtggacaagaaagttgagcccaaatcttgtgacaaaactcacacagcgccaccggcgccagcacctgaactcctggggggaccgtcagtcttcctcttccccccaaaacccaaggacaccctcatgatctcccggacccctgaggtcacatgcgtggtggtggacgtgagccacgaagaccctgaggtcaagttcaactggtacgtggacggcgtggaggtgcataatgccaagacaaagccgcgggaggagcagtacaacgccacgtaccgtgtggtcagcgtcctcaccgtcctgcaccaggactggctgaatggcaaggagtacaagtgcaaggtctccaacggagccctcccagcccccatcgcggcaaccatctccaaagccaaagggcagccccgagagccacaggtgtacaccctgcccccatcccaggaggagatgaccaagaaccaggtcagcctgacctgcctggtcaaaggcttctaccccagcgacatcgccgtggagtgggagagcaatgggcagccggagaacaactacaagaccacgcctcccgtgctggactccgacggctccttcttcctctacagcaggctaaccgtggacaagagcaggtggcaggaggggaatgtcttctcatgctccgtgatgcatgaggctctgcacaaccactacacacagaagagcctctccctgtctctgggtaaatga

SEQ ID NO: 70 - protein, 330 aa, Artificial Sequence
  Description of the artificial sequence: amino acid sequence of IgG1114_AA_AAA_K326G CH
ASTKGPSVFPLAPSSKSTSGGTAALGCLVKDYFPEPVTVSWNSGALTSGVHTFPAVLQSSGLYSLSSVVTVPSSSLGTQTYICNVNHKPSNTKVDKKVEPKSCDKTHTAPPAPAPELLGGPSVFLFPPKPKDTLMISRTPEVTCVVVDVSHEDPEVKFNWYVDGVEVHNAKTKPREEQYNATYRVVSVLTVLHQDWLNGKEYKCKVSNGALPAPIAATISKAKGQPREPQVYTLPPSQEEMTKNQVSLTCLVKGFYPSDIAVEWESNGQPENNYKTTPPVLDSDGSFFLYSRLTVDKSRWQEGNVFSCSVMHEALHNHYTQKSLSLSLGK

SEQ ID NO: 71 - DNA, 993 bp, Artificial Sequence
  Description of the artificial sequence: base sequence of IgG1114_AA_AAA_L328R CH
gctagcaccaagggcccatcggtcttccccctggcaccctcctccaagagcacctctgggggcacagcggccctgggctgcctggtcaaggactacttccccgaaccggtgacggtgtcgtggaactcaggcgccctgaccagcggcgtgcacaccttcccggctgtcctacagtcctcaggactctactccctcagcagcgtggtgaccgtgccctccagcagcttgggcacccagacctacatctgcaacgtgaatcacaagcccagcaacaccaaggtggacaagaaagttgagcccaaatcttgtgacaaaactcacacagcgccaccggcgccagcacctgaactcctggggggaccgtcagtcttcctcttccccccaaaacccaaggacaccctcatgatctcccggacccctgaggtcacatgcgtggtggtggacgtgagccacgaagaccctgaggtcaagttcaactggtacgtggacggcgtggaggtgcataatgccaagacaaagccgcgggaggagcagtacaacgccacgtaccgtgtggtcagcgtcctcaccgtcctgcaccaggactggctgaatggcaaggagtacaagtgcaaggtctccaacaaagcccgaccagcccccatcgcggcaaccatctccaaagccaaagggcagccccgagagccacaggtgtacaccctgcccccatcccaggaggagatgaccaagaaccaggtcagcctgacctgcctggtcaaaggcttctaccccagcgacatcgccgtggagtgggagagcaatgggcagccggagaacaactacaagaccacgcctcccgtgctggactccgacggctccttcttcctctacagcaggctaaccgtggacaagagcaggtggcaggaggggaatgtcttctcatgctccgtgatgcatgaggctctgcacaaccactacacacagaagagcctctccctgtctctgggtaaatga

SEQ ID NO: 72 - protein, 330 aa, Artificial Sequence
  Description of the artificial sequence: amino acid sequence of IgG1114_AA_AAA_L328R CH
ASTKGPSVFPLAPSSKSTSGGTAALGCLVKDYFPEPVTVSWNSGALTSGVHTFPAVLQSSGLYSLSSVVTVPSSSLGTQTYICNVNHKPSNTKVDKKVEPKSCDKTHTAPPAPAPELLGGPSVFLFPPKPKDTLMISRTPEVTCVVVDVSHEDPEVKFNWYVDGVEVHNAKTKPREEQYNATYRVVSVLTVLHQDWLNGKEYKCKVSNKARPAPIAATISKAKGQPREPQVYTLPPSQEEMTKNQVSLTCLVKGFYPSDIAVEWESNGQPENNYKTTPPVLDSDGSFFLYSRLTVDKSRWQEGNVFSCSVMHEALHNHYTQKSLSLSLGK

SEQ ID NO: 73 - DNA, 993 bp, Artificial Sequence
  Description of the artificial sequence: base sequence of IgG1114_AA_AAA_P329K CH
gctagcaccaagggcccatcggtcttccccctggcaccctcctccaagagcacctctgggggcacagcggccctgggctgcctggtcaaggactacttccccgaaccggtgacggtgtcgtggaactcaggcgccctgaccagcggcgtgcacaccttcccggctgtcctacagtcctcaggactctactccctcagcagcgtggtgaccgtgccctccagcagcttgggcacccagacctacatctgcaacgtgaatcacaagcccagcaacaccaaggtggacaagaaagttgagcccaaatcttgtgacaaaactcacacagcgccaccggcgccagcacctgaactcctggggggaccgtcagtcttcctcttccccccaaaacccaaggacaccctcatgatctcccggacccctgaggtcacatgcgtggtggtggacgtgagccacgaagaccctgaggtcaagttcaactggtacgtggacggcgtggaggtgcataatgccaagacaaagccgcgggaggagcagtacaacgccacgtaccgtgtggtcagcgtcctcaccgtcctgcaccaggactggctgaatggcaaggagtacaagtgcaaggtctccaacaaagccctcaaggcccccatcgcggcaaccatctccaaagccaaagggcagccccgagagccacaggtgtacaccctgcccccatcccaggaggagatgaccaagaaccaggtcagcctgacctgcctggtcaaaggcttctaccccagcgacatcgccgtggagtgggagagcaatgggcagccggagaacaactacaagaccacgcctcccgtgctggactccgacggctccttcttcctctacagcaggctaaccgtggacaagagcaggtggcaggaggggaatgtcttctcatgctccgtgatgcatgaggctctgcacaaccactacacacagaagagcctctccctgtctctgggtaaatga

SEQ ID NO: 74 - protein, 330 aa, Artificial Sequence
  Description of the artificial sequence: amino acid sequence of IgG1114_AA_AAA_P329K CH
ASTKGPSVFPLAPSSKSTSGGTAALGCLVKDYFPEPVTVSWNSGALTSGVHTFPAVLQSSGLYSLSSVVTVPSSSLGTQTYICNVNHKPSNTKVDKKVEPKSCDKTHTAPPAPAPELLGGPSVFLFPPKPKDTLMISRTPEVTCVVVDVSHEDPEVKFNWYVDGVEVHNAKTKPREEQYNATYRVVSVLTVLHQDWLNGKEYKCKVSNKALKAPIAATISKAKGQPREPQVYTLPPSQEEMTKNQVSLTCLVKGFYPSDIAVEWESNGQPENNYKTTPPVLDSDGSFFLYSRLTVDKSRWQEGNVFSCSVMHEALHNHYTQKSLSLSLGK

SEQ ID NO: 75 - DNA, 993 bp, Artificial Sequence
  Description of the artificial sequence: base sequence of IgG1114_AA_AAA_P329W CH
gctagcaccaagggcccatcggtcttccccctggcaccctcctccaagagcacctctgggggcacagcggccctgggctgcctggtcaaggactacttccccgaaccggtgacggtgtcgtggaactcaggcgccctgaccagcggcgtgcacaccttcccggctgtcctacagtcctcaggactctactccctcagcagcgtggtgaccgtgccctccagcagcttgggcacccagacctacatctgcaacgtgaatcacaagcccagcaacaccaaggtggacaagaaagttgagcccaaatcttgtgacaaaactcacacagcgccaccggcgccagcacctgaactcctggggggaccgtcagtcttcctcttccccccaaaacccaaggacaccctcatgatctcccggacccctgaggtcacatgcgtggtggtggacgtgagccacgaagaccctgaggtcaagttcaactggtacgtggacggcgtggaggtgcataatgccaagacaaagccgcgggaggagcagtacaacgccacgtaccgtgtggtcagcgtcctcaccgtcctgcaccaggactggctgaatggcaaggagtacaagtgcaaggtctccaacaaagccctctgggcccccatcgcggcaaccatctccaaagccaaagggcagccccgagagccacaggtgtacaccctgcccccatcccaggaggagatgaccaagaaccaggtcagcctgacctgcctggtcaaaggcttctaccccagcgacatcgccgtggagtgggagagcaatgggcagccggagaacaactacaagaccacgcctcccgtgctggactccgacggctccttcttcctctacagcaggctaaccgtggacaagagcaggtggcaggaggggaatgtcttctcatgctccgtgatgcatgaggctctgcacaaccactacacacagaagagcctctccctgtctctgggtaaatga

SEQ ID NO: 76 - protein, 330 aa, Artificial Sequence
  Description of the artificial sequence: amino acid sequence of IgG1114_AA_AAA_P329W CH
ASTKGPSVFPLAPSSKSTSGGTAALGCLVKDYFPEPVTVSWNSGALTSGVHTFPAVLQSSGLYSLSSVVTVPSSSLGTQTYICNVNHKPSNTKVDKKVEPKSCDKTHTAPPAPAPELLGGPSVFLFPPKPKDTLMISRTPEVTCVVVDVSHEDPEVKFNWYVDGVEVHNAKTKPREEQYNATYRVVSVLTVLHQDWLNGKEYKCKVSNKALWAPIAATISKAKGQPREPQVYTLPPSQEEMTKNQVSLTCLVKGFYPSDIAVEWESNGQPENNYKTTPPVLDSDGSFFLYSRLTVDKSRWQEGNVFSCSVMHEALHNHYTQKSLSLSLGK

SEQ ID NO: 77 - DNA, 993 bp, Artificial Sequence
  Description of the artificial sequence: base sequence of IgG1114_AA_AAA_A330P CH
gctagcaccaagggcccatcggtcttccccctggcaccctcctccaagagcacctctgggggcacagcggccctgggctgcctggtcaaggactacttccccgaaccggtgacggtgtcgtggaactcaggcgccctgaccagcggcgtgcacaccttcccggctgtcctacagtcctcaggactctactccctcagcagcgtggtgaccgtgccctccagcagcttgggcacccagacctacatctgcaacgtgaatcacaagcccagcaacaccaaggtggacaagaaagttgagcccaaatcttgtgacaaaactcacacagcgccaccggcgccagcacctgaactcctggggggaccgtcagtcttcctcttccccccaaaacccaaggacaccctcatgatctcccggacccctgaggtcacatgcgtggtggtggacgtgagccacgaagaccctgaggtcaagttcaactggtacgtggacggcgtggaggtgcataatgccaagacaaagccgcgggaggagcagtacaacgccacgtaccgtgtggtcagcgtcctcaccgtcctgcaccaggactggctgaatggcaaggagtacaagtgcaaggtctccaacaaagccctcccaccccccatcgcggcaaccatctccaaagccaaagggcagccccgagagccacaggtgtacaccctgcccccatcccaggaggagatgaccaagaaccaggtcagcctgacctgcctggtcaaaggcttctaccccagcgacatcgccgtggagtgggagagcaatgggcagccggagaacaactacaagaccacgcctcccgtgctggactccgacggctccttcttcctctacagcaggctaaccgtggacaagagcaggtggcaggaggggaatgtcttctcatgctccgtgatgcatgaggctctgcacaaccactacacacagaagagcctctccctgtctctgggtaaatga

SEQ ID NO: 78 - protein, 330 aa, Artificial Sequence
  Description of the artificial sequence: amino acid sequence of IgG1114_AA_AAA_A330P CH
ASTKGPSVFPLAPSSKSTSGGTAALGCLVKDYFPEPVTVSWNSGALTSGVHTFPAVLQSSGLYSLSSVVTVPSSSLGTQTYICNVNHKPSNTKVDKKVEPKSCDKTHTAPPAPAPELLGGPSVFLFPPKPKDTLMISRTPEVTCVVVDVSHEDPEVKFNWYVDGVEVHNAKTKPREEQYNATYRVVSVLTVLHQDWLNGKEYKCKVSNKALPPPIAATISKAKGQPREPQVYTLPPSQEEMTKNQVSLTCLVKGFYPSDIAVEWESNGQPENNYKTTPPVLDSDGSFFLYSRLTVDKSRWQEGNVFSCSVMHEALHNHYTQKSLSLSLGK

SEQ ID NO: 79 - DNA, 357 bp, Artificial Sequence
  Description of the artificial sequence: base sequence of CCR4(KM2160) VH
gaggtgcagctggtggagtctgggggagacttaatgaagcctggagggtccctgaaaatctcctgtgcagcctctggattcattttcagtaattatggcatgtcttgggttcgccagactccagacatgaggctggaatgggtcgcaaccattagtagtgctagtacttattcctattatccagacagtgtgaagggacgattcaccatatccagggacaacgccgagaactccctatatctgcaaatgaatagtctgaggtctgaggacacaggcatatattactgtggaagacatagcgatggaaacttcgcgtttggttattggggccgagggactctggtcactgtctctgca

SEQ ID NO: 80 - protein, 119 aa, Artificial Sequence
  Description of the artificial sequence: amino acid sequence of CCR4(KM2160) VH
EVQLVESGGDLMKPGGSLKISCAASGFIFSNYGMSWVRQTPDMRLEWVATISSASTYSYYPDSVKGRFTISRDNAENSLYLQMNSLRSEDTGIYYCGRHSDGNFAFGYWGRGTLVTVSA

SEQ ID NO: 81 - DNA, 336 bp, Artificial Sequence
  Description of the artificial sequence: base sequence of CCR4(KM2160) VL
gatgttttgatgacccaaactccactctccctgcctgtcagtcttggagatcaagcctccatctcttgcagatctagtcggaacattgttcatattaatggtgacacatatttagaatggtacctgcagagaccgggccagtctccaaagctcctaatctacaaagtttccaaccgattttctggggtcccagacaggttcagtggcagtggatcagggacagatttcacactcaagatcagcagagtggaggctgaggatctgggagtttattactgctttcaaggttcacttcttccgtggacgttcggtggaggcaccaggctggaaatcaga

SEQ ID NO: 82 - protein, 112 aa, Artificial Sequence
  Description of the artificial sequence: amino acid sequence of CCR4(KM2160) VL
DVLMTQTPLSLPVSLGDQASISCRSSRNIVHINGDTYLEWYLQRPGQSPKLLIYKVSNRFSGVPDRFSGSGSGTDFTLKISRVEAEDLGVYYCFQGSLLPWTFGGGTRLEIR

SEQ ID NO: 83 - DNA, 993 bp, Artificial Sequence
  Description of the artificial sequence: base sequence of IgG1_AAA CH
gctagcaccaagggcccatcggtcttccccctggcaccctcctccaagagcacctctgggggcacagcggccctgggctgcctggtcaaggactacttccccgaaccggtgacggtgtcgtggaactcaggcgccctgaccagcggcgtgcacaccttcccggctgtcctacagtcctcaggactctactccctcagcagcgtggtgaccgtgccctccagcagcttgggcacccagacctacatctgcaacgtgaatcacaagcccagcaacaccaaggtggacaagaaagttgagcccaaatcttgtgacaaaactcacacatgcccaccgtgcccagcacctgaactcctggggggaccgtcagtcttcctcttccccccaaaacccaaggacaccctcatgatctcccggacccctgaggtcacatgcgtggtggtggacgtgagccacgaagaccctgaggtcaagttcaactggtacgtggacggcgtggaggtgcataatgccaagacaaagccgcgggaggagcagtacaacgccacgtaccgtgtggtcagcgtcctcaccgtcctgcaccaggactggctgaatggcaaggagtacaagtgcaaggtctccaacaaagccctcccagcccccatcgcggcaaccatctccaaagccaaagggcagccccgagaaccacaggtgtacaccctgcccccatcccgggatgagctgaccaagaaccaggtcagcctgacctgcctggtcaaaggcttctatcccagcgacatcgccgtggagtgggagagcaatgggcagccggagaacaactacaagaccacgcctcccgtgctggactccgacggctccttcttcctctacagcaagctcaccgtggacaagagcaggtggcagcaggggaacgtcttctcatgctccgtgatgcatgaggctctgcacaaccactacacgcagaagagcctctccctgtctccgggtaaatga

SEQ ID NO: 84 - protein, 330 aa, Artificial Sequence
  Description of the artificial sequence: amino acid sequence of IgG1_AAA CH
ASTKGPSVFPLAPSSKSTSGGTAALGCLVKDYFPEPVTVSWNSGALTSGVHTFPAVLQSSGLYSLSSVVTVPSSSLGTQTYICNVNHKPSNTKVDKKVEPKSCDKTHTCPPCPAPELLGGPSVFLFPPKPKDTLMISRTPEVTCVVVDVSHEDPEVKFNWYVDGVEVHNAKTKPREEQYNATYRVVSVLTVLHQDWLNGKEYKCKVSNKALPAPIAATISKAKGQPREPQVYTLPPSRDELTKNQVSLTCLVKGFYPSDIAVEWESNGQPENNYKTTPPVLDSDGSFFLYSKLTVDKSRWQQGNVFSCSVMHEALHNHYTQKSLSLSPGK

SEQ ID NO: 85 - DNA, 993 bp, Artificial Sequence
  Description of the artificial sequence: base sequence of IgG1_DE CH
gctagcaccaagggcccatcggtcttccccctggcaccctcctccaagagcacctctgggggcacagcggccctgggctgcctggtcaaggactacttccccgaaccggtgacggtgtcgtggaactcaggcgccctgaccagcggcgtgcacaccttcccggctgtcctacagtcctcaggactctactccctcagcagcgtggtgaccgtgccctccagcagcttgggcacccagacctacatctgcaacgtgaatcacaagcccagcaacaccaaggtggacaagaaagttgagcccaaatcttgtgacaaaactcacacatgcccaccgtgcccagcacctgaactcctggggggaccggatgtcttcctcttccccccaaaacccaaggacaccctcatgatctcccggacccctgaggtcacatgcgtggtggtggacgtgagccacgaagaccctgaggtcaagttcaactggtacgtggacggcgtggaggtgcataatgccaagacaaagccgcgggaggagcagtacaacagcacgtaccgtgtggtcagcgtcctcaccgtcctgcaccaggactggctgaatggcaaggagtacaagtgcaaggtctccaacaaagccctcccagcccccgaagagaaaaccatctccaaagccaaagggcagccccgagaaccacaggtgtacaccctgcccccatcccgggatgagctgaccaagaaccaggtcagcctgacctgcctggtcaaaggcttctatcccagcgacatcgccgtggagtgggagagcaatgggcagccggagaacaactacaagaccacgcctcccgtgctggactccgacggctccttcttcctctacagcaagctcaccgtggacaagagcaggtggcagcaggggaacgtcttctcatgctccgtgatgcatgaggctctgcacaaccactacacgcagaagagcctctccctgtctccgggtaaatga

SEQ ID NO: 86 - protein, 330 aa, Artificial Sequence
  Description of the artificial sequence: amino acid sequence of IgG1_DE CH
ASTKGPSVFPLAPSSKSTSGGTAALGCLVKDYFPEPVTVSWNSGALTSGVHTFPAVLQSSGLYSLSSVVTVPSSSLGTQTYICNVNHKPSNTKVDKKVEPKSCDKTHTCPPCPAPELLGGPDVFLFPPKPKDTLMISRTPEVTCVVVDVSHEDPEVKFNWYVDGVEVHNAKTKPREEQYNSTYRVVSVLTVLHQDWLNGKEYKCKVSNKALPAPEEKTISKAKGQPREPQVYTLPPSRDELTKNQVSLTCLVKGFYPSDIAVEWESNGQPENNYKTTPPVLDSDGSFFLYSKLTVDKSRWQQGNVFSCSVMHEALHNHYTQKSLSLSPGK

SEQ ID NO: 87 - DNA, 993 bp, Artificial Sequence
  Description of the artificial sequence: base sequence of IgG1_S239D/A330F CH
gctagcaccaagggcccatcggtcttccccctggcaccctcctccaagagcacctctgggggcacagcggccctgggctgcctggtcaaggactacttccccgaaccggtgacggtgtcgtggaactcaggcgccctgaccagcggcgtgcacaccttcccggctgtcctacagtcctcaggactctactccctcagcagcgtggtgaccgtgccctccagcagcttgggcacccagacctacatctgcaacgtgaatcacaagcccagcaacaccaaggtggacaagaaagttgagcccaaatcttgtgacaaaactcacacatgcccaccgtgcccagcacctgaactcctggggggaccggatgtcttcctcttccccccaaaacccaaggacaccctcatgatctcccggacccctgaggtcacatgcgtggtggtggacgtgagccacgaagaccctgaggtcaagttcaactggtacgtggacggcgtggaggtgcataatgccaagacaaagccgcgggaggagcagtacaacagcacgtaccgtgtggtcagcgtcctcaccgtcctgcaccaggactggctgaatggcaaggagtacaagtgcaaggtctccaacaaagccctcccattccccatcgagaaaaccatctccaaagccaaagggcagccccgagaaccacaggtgtacaccctgcccccatcccgggatgagctgaccaagaaccaggtcagcctgacctgcctggtcaaaggcttctatcccagcgacatcgccgtggagtgggagagcaatgggcagccggagaacaactacaagaccacgcctcccgtgctggactccgacggctccttcttcctctacagcaagctcaccgtggacaagagcaggtggcagcaggggaacgtcttctcatgctccgtgatgcatgaggctctgcacaaccactacacgcagaagagcctctccctgtctccgggtaaatga

SEQ ID NO: 88 - protein, 330 aa, Artificial Sequence
  Description of the artificial sequence: amino acid sequence of IgG1_S239D/A330F CH
ASTKGPSVFPLAPSSKSTSGGTAALGCLVKDYFPEPVTVSWNSGALTSGVHTFPAVLQSSGLYSLSSVVTVPSSSLGTQTYICNVNHKPSNTKVDKKVEPKSCDKTHTCPPCPAPELLGGPDVFLFPPKPKDTLMISRTPEVTCVVVDVSHEDPEVKFNWYVDGVEVHNAKTKPREEQYNSTYRVVSVLTVLHQDWLNGKEYKCKVSNKALPFPIEKTISKAKGQPREPQVYTLPPSRDELTKNQVSLTCLVKGFYPSDIAVEWESNGQPENNYKTTPPVLDSDGSFFLYSKLTVDKSRWQQGNVFSCSVMHEALHNHYTQKSLSLSPGK

SEQ ID NO: 89 - DNA, 993 bp, Artificial Sequence
  Description of the artificial sequence: base sequence of IgG1_S239D/K326T CH
gctagcaccaagggcccatcggtcttccccctggcaccctcctccaagagcacctctgggggcacagcggccctgggctgcctggtcaaggactacttccccgaaccggtgacggtgtcgtggaactcaggcgccctgaccagcggcgtgcacaccttcccggctgtcctacagtcctcaggactctactccctcagcagcgtggtgaccgtgccctccagcagcttgggcacccagacctacatctgcaacgtgaatcacaagcccagcaacaccaaggtggacaagaaagttgagcccaaatcttgtgacaaaactcacacatgcccaccgtgcccagcacctgaactcctggggggaccggatgtcttcctcttccccccaaaacccaaggacaccctcatgatctcccggacccctgaggtcacatgcgtggtggtggacgtgagccacgaagaccctgaggtcaagttcaactggtacgtggacggcgtggaggtgcataatgccaagacaaagccgcgggaggagcagtacaacagcacgtaccgtgtggtcagcgtcctcaccgtcctgcaccaggactggctgaatggcaaggagtacaagtgcaaggtctccaacacagccctcccagcccccatcgagaaaaccatctccaaagccaaagggcagccccgagaaccacaggtgtacaccctgcccccatcccgggatgagctgaccaagaaccaggtcagcctgacctgcctggtcaaaggcttctatcccagcgacatcgccgtggagtgggagagcaatgggcagccggagaacaactacaagaccacgcctcccgtgctggactccgacggctccttcttcctctacagcaagctcaccgtggacaagagcaggtggcagcaggggaacgtcttctcatgctccgtgatgcatgaggctctgcacaaccactacacgcagaagagcctctccctgtctccgggtaaatga

SEQ ID NO: 90 - protein, 330 aa, Artificial Sequence
  Description of the artificial sequence: amino acid sequence of IgG1_S239D/K326T CH
ASTKGPSVFPLAPSSKSTSGGTAALGCLVKDYFPEPVTVSWNSGALTSGVHTFPAVLQSSGLYSLSSVVTVPSSSLGTQTYICNVNHKPSNTKVDKKVEPKSCDKTHTCPPCPAPELLGGPDVFLFPPKPKDTLMISRTPEVTCVVVDVSHEDPEVKFNWYVDGVEVHNAKTKPREEQYNSTYRVVSVLTVLHQDWLNGKEYKCKVSNTALPAPIEKTISKAKGQPREPQVYTLPPSRDELTKNQVSLTCLVKGFYPSDIAVEWESNGQPENNYKTTPPVLDSDGSFFLYSKLTVDKSRWQQGNVFSCSVMHEALHNHYTQKSLSLSPGK

SEQ ID NO: 91 - DNA, 993 bp, Artificial Sequence
  Description of the artificial sequence: base sequence of IgG1_AAA_P247L CH
gctagcaccaagggcccatcggtcttccccctggcaccctcctccaagagcacctctgggggcacagcggccctgggctgcctggtcaaggactacttccccgaaccggtgacggtgtcgtggaactcaggcgccctgaccagcggcgtgcacaccttcccggctgtcctacagtcctcaggactctactccctcagcagcgtggtgaccgtgccctccagcagcttgggcacccagacctacatctgcaacgtgaatcacaagcccagcaacaccaaggtggacaagaaagttgagcccaaatcttgtgacaaaactcacacatgcccaccgtgcccagcacctgaactcctggggggaccgtcagtcttcctcttccccccaaaactcaaggacaccctcatgatctcccggacccctgaggtcacatgcgtggtggtggacgtgagccacgaagaccctgaggtcaagttcaactggtacgtggacggcgtggaggtgcataatgccaagacaaagccgcgggaggagcagtacaacgccacgtaccgtgtggtcagcgtcctcaccgtcctgcaccaggactggctgaatggcaaggagtacaagtgcaaggtctccaacaaagccctcccagcccccatcgcggcaaccatctccaaagccaaagggcagccccgagaaccacaggtgtacaccctgcccccatcccgggatgagctgaccaagaaccaggtcagcctgacctgcctggtcaaaggcttctatcccagcgacatcgccgtggagtgggagagcaatgggcagccggagaacaactacaagaccacgcctcccgtgctggactccgacggctccttcttcctctacagcaagctcaccgtggacaagagcaggtggcagcaggggaacgtcttctcatgctccgtgatgcatgaggctctgcacaaccactacacgcagaagagcctctccctgtctccgggtaaatga

SEQ ID NO: 92 - protein, 330 aa, Artificial Sequence
  Description of the artificial sequence: amino acid sequence of IgG1_AAA_P247L CH
ASTKGPSVFPLAPSSKSTSGGTAALGCLVKDYFPEPVTVSWNSGALTSGVHTFPAVLQSSGLYSLSSVVTVPSSSLGTQTYICNVNHKPSNTKVDKKVEPKSCDKTHTCPPCPAPELLGGPSVFLFPPKLKDTLMISRTPEVTCVVVDVSHEDPEVKFNWYVDGVEVHNAKTKPREEQYNATYRVVSVLTVLHQDWLNGKEYKCKVSNKALPAPIAATISKAKGQPREPQVYTLPPSRDELTKNQVSLTCLVKGFYPSDIAVEWESNGQPENNYKTTPPVLDSDGSFFLYSKLTVDKSRWQQGNVFSCSVMHEALHNHYTQKSLSLSPGK

SEQ ID NO: 93 - DNA, 993 bp, Artificial Sequence
  Description of the artificial sequence: base sequence of IgG1_AAA_R292P CH
gctagcaccaagggcccatcggtcttccccctggcaccctcctccaagagcacctctgggggcacagcggccctgggctgcctggtcaaggactacttccccgaaccggtgacggtgtcgtggaactcaggcgccctgaccagcggcgtgcacaccttcccggctgtcctacagtcctcaggactctactccctcagcagcgtggtgaccgtgccctccagcagcttgggcacccagacctacatctgcaacgtgaatcacaagcccagcaacaccaaggtggacaagaaagttgagcccaaatcttgtgacaaaactcacacatgcccaccgtgcccagcacctgaactcctggggggaccgtcagtcttcctcttccccccaaaacccaaggacaccctcatgatctcccggacccctgaggtcacatgcgtggtggtggacgtgagccacgaagaccctgaggtcaagttcaactggtacgtggacggcgtggaggtgcataatgccaagacaaagccgcccgaggagcagtacaacgccacgtaccgtgtggtcagcgtcctcaccgtcctgcaccaggactggctgaatggcaaggagtacaagtgcaaggtctccaacaaagccctcccagcccccatcgcggcaaccatctccaaagccaaagggcagccccgagaaccacaggtgtacaccctgcccccatcccgggatgagctgaccaagaaccaggtcagcctgacctgcctggtcaaaggcttctatcccagcgacatcgccgtggagtgggagagcaatgggcagccggagaacaactacaagaccacgcctcccgtgctggactccgacggctccttcttcctctacagcaagctcaccgtggacaagagcaggtggcagcaggggaacgtcttctcatgctccgtgatgcatgaggctctgcacaaccactacacgcagaagagcctctccctgtctccgggtaaatga

SEQ ID NO: 94 - protein, 330 aa, Artificial Sequence
  Description of the artificial sequence: amino acid sequence of IgG1_AAA_R292P CH
ASTKGPSVFPLAPSSKSTSGGTAALGCLVKDYFPEPVTVSWNSGALTSGVHTFPAVLQSSGLYSLSSVVTVPSSSLGTQTYICNVNHKPSNTKVDKKVEPKSCDKTHTCPPCPAPELLGGPSVFLFPPKPKDTLMISRTPEVTCVVVDVSHEDPEVKFNWYVDGVEVHNAKTKPPEEQYNATYRVVSVLTVLHQDWLNGKEYKCKVSNKALPAPIAATISKAKGQPREPQVYTLPPSRDELTKNQVSLTCLVKGFYPSDIAVEWESNGQPENNYKTTPPVLDSDGSFFLYSKLTVDKSRWQQGNVFSCSVMHEALHNHYTQKSLSLSPGK

SEQ ID NO: 95 - DNA, 993 bp, Artificial Sequence
  Description of the artificial sequence: base sequence of IgG1_AAA_H268E CH
gctagcaccaagggcccatcggtcttccccctggcaccctcctccaagagcacctctgggggcacagcggccctgggctgcctggtcaaggactacttccccgaaccggtgacggtgtcgtggaactcaggcgccctgaccagcggcgtgcacaccttcccggctgtcctacagtcctcaggactctactccctcagcagcgtggtgaccgtgccctccagcagcttgggcacccagacctacatctgcaacgtgaatcacaagcccagcaacaccaaggtggacaagaaagttgagcccaaatcttgtgacaaaactcacacatgcccaccgtgcccagcacctgaactcctggggggaccgtcagtcttcctcttccccccaaaacccaaggacaccctcatgatctcccggacccctgaggtcacatgcgtggtggtggacgtgagcgaggaagaccctgaggtcaagttcaactggtacgtggacggcgtggaggtgcataatgccaagacaaagccgcgggaggagcagtacaacgccacgtaccgtgtggtcagcgtcctcaccgtcctgcaccaggactggctgaatggcaaggagtacaagtgcaaggtctccaacaaagccctcccagcccccatcgcggcaaccatctccaaagccaaagggcagccccgagaaccacaggtgtacaccctgcccccatcccgggatgagctgaccaagaaccaggtcagcctgacctgcctggtcaaaggcttctatcccagcgacatcgccgtggagtgggagagcaatgggcagccggagaacaactacaagaccacgcctcccgtgctggactccgacggctccttcttcctctacagcaagctcaccgtggacaagagcaggtggcagcaggggaacgtcttctcatgctccgtgatgcatgaggctctgcacaaccactacacgcagaagagcctctccctgtctccgggtaaatga

SEQ ID NO: 96 - protein, 330 aa, Artificial Sequence
  Description of the artificial sequence: amino acid sequence of IgG1_AAA_H268E CH
ASTKGPSVFPLAPSSKSTSGGTAALGCLVKDYFPEPVTVSWNSGALTSGVHTFPAVLQSSGLYSLSSVVTVPSSSLGTQTYICNVNHKPSNTKVDKKVEPKSCDKTHTCPPCPAPELLGGPSVFLFPPKPKDTLMISRTPEVTCVVVDVSEEDPEVKFNWYVDGVEVHNAKTKPREEQYNATYRVVSVLTVLHQDWLNGKEYKCKVSNKALPAPIAATISKAKGQPREPQVYTLPPSRDELTKNQVSLTCLVKGFYPSDIAVEWESNGQPENNYKTTPPVLDSDGSFFLYSKLTVDKSRWQQGNVFSCSVMHEALHNHYTQKSLSLSPGK

SEQ ID NO: 97 - DNA, 993 bp, Artificial Sequence
  Description of the artificial sequence: base sequence of IgG1_AAA_K326T CH
gctagcaccaagggcccatcggtcttccccctggcaccctcctccaagagcacctctgggggcacagcggccctgggctgcctggtcaaggactacttccccgaaccggtgacggtgtcgtggaactcaggcgccctgaccagcggcgtgcacaccttcccggctgtcctacagtcctcaggactctactccctcagcagcgtggtgaccgtgccctccagcagcttgggcacccagacctacatctgcaacgtgaatcacaagcccagcaacaccaaggtggacaagaaagttgagcccaaatcttgtgacaaaactcacacatgcccaccgtgcccagcacctgaactcctggggggaccgtcagtcttcctcttccccccaaaacccaaggacaccctcatgatctcccggacccctgaggtcacatgcgtggtggtggacgtgagccacgaagaccctgaggtcaagttcaactggtacgtggacggcgtggaggtgcataatgccaagacaaagccgcgggaggagcagtacaacgccacgtaccgtgtggtcagcgtcctcaccgtcctgcaccaggactggctgaatggcaaggagtacaagtgcaaggtctccaacacagccctcccagcccccatcgcggcaaccatctccaaagccaaagggcagccccgagaaccacaggtgtacaccctgcccccatcccgggatgagctgaccaagaaccaggtcagcctgacctgcctggtcaaaggcttctatcccagcgacatcgccgtggagtgggagagcaatgggcagccggagaacaactacaagaccacgcctcccgtgctggactccgacggctccttcttcctctacagcaagctcaccgtggacaagagcaggtggcagcaggggaacgtcttctcatgctccgtgatgcatgaggctctgcacaaccactacacgcagaagagcctctccctgtctccgggtaaatga

SEQ ID NO: 98 - protein, 330 aa, Artificial Sequence
  Description of the artificial sequence: amino acid sequence of IgG1_AAA_K326T CH
ASTKGPSVFPLAPSSKSTSGGTAALGCLVKDYFPEPVTVSWNSGALTSGVHTFPAVLQSSGLYSLSSVVTVPSSSLGTQTYICNVNHKPSNTKVDKKVEPKSCDKTHTCPPCPAPELLGGPSVFLFPPKPKDTLMISRTPEVTCVVVDVSHEDPEVKFNWYVDGVEVHNAKTKPREEQYNATYRVVSVLTVLHQDWLNGKEYKCKVSNTALPAPIAATISKAKGQPREPQVYTLPPSRDELTKNQVSLTCLVKGFYPSDIAVEWESNGQPENNYKTTPPVLDSDGSFFLYSKLTVDKSRWQQGNVFSCSVMHEALHNHYTQKSLSLSPGK

SEQ ID NO: 99 - DNA, 993 bp, Artificial Sequence
  Description of the artificial sequence: base sequence of IgG1_AAA_P247L/N421K CH
gctagcaccaagggcccatcggtcttccccctggcaccctcctccaagagcacctctgggggcacagcggccctgggctgcctggtcaaggactacttccccgaaccggtgacggtgtcgtggaactcaggcgccctgaccagcggcgtgcacaccttcccggctgtcctacagtcctcaggactctactccctcagcagcgtggtgaccgtgccctccagcagcttgggcacccagacctacatctgcaacgtgaatcacaagcccagcaacaccaaggtggacaagaaagttgagcccaaatcttgtgacaaaactcacacatgcccaccgtgcccagcacctgaactcctggggggaccgtcagtcttcctcttccccccaaaactcaaggacaccctcatgatctcccggacccctgaggtcacatgcgtggtggtggacgtgagccacgaagaccctgaggtcaagttcaactggtacgtggacggcgtggaggtgcataatgccaagacaaagccgcgggaggagcagtacaacgccacgtaccgtgtggtcagcgtcctcaccgtcctgcaccaggactggctgaatggcaaggagtacaagtgcaaggtctccaacaaagccctcccagcccccatcgcggcaaccatctccaaagccaaagggcagccccgagaaccacaggtgtacaccctgcccccatcccgggatgagctgaccaagaaccaggtcagcctgacctgcctggtcaaaggcttctatcccagcgacatcgccgtggagtgggagagcaatgggcagccggagaacaactacaagaccacgcctcccgtgctggactccgacggctccttcttcctctacagcaagctcaccgtggacaagagcaggtggcagcaggggaaggtcttctcatgctccgtgatgcatgaggctctgcacaaccactacacgcagaagagcctctccctgtctccgggtaaatga

SEQ ID NO: 100 - protein, 330 aa, Artificial Sequence
  Description of the artificial sequence: amino acid sequence of IgG1_AAA_P247L/N421K CH
ASTKGPSVFPLAPSSKSTSGGTAALGCLVKDYFPEPVTVSWNSGALTSGVHTFPAVLQSSGLYSLSSVVTVPSSSLGTQTYICNVNHKPSNTKVDKKVEPKSCDKTHTCPPCPAPELLGGPSVFLFPPKLKDTLMISRTPEVTCVVVDVSHEDPEVKFNWYVDGVEVHNAKTKPREEQYNATYRVVSVLTVLHQDWLNGKEYKCKVSNKALPAPIAATISKAKGQPREPQVYTLPPSRDELTKNQVSLTCLVKGFYPSDIAVEWESNGQPENNYKTTPPVLDSDGSFFLYSKLTVDKSRWQQGKVFSCSVMHEALHNHYTQKSLSLSPGK

SEQ ID NO: 101 - DNA, 993 bp, Artificial Sequence
  Description of the artificial sequence: amino acid sequence of IgG1_S298A/E333A/R292L/K334E CH
gctagcaccaagggcccatcggtcttccccctggcaccctcctccaagagcacctctgggggcacagcggccctgggctgcctggtcaaggactacttccccgaaccggtgacggtgtcgtggaactcaggcgccctgaccagcggcgtgcacaccttcccggctgtcctacagtcctcaggactctactccctcagcagcgtggtgaccgtgccctccagcagcttgggcacccagacctacatctgcaacgtgaatcacaagcccagcaacaccaaggtggacaagaaagttgagcccaaatcttgtgacaaaactcacacatgcccaccgtgcccagcacctgaactcctggggggaccgtcagtcttcctcttccccccaaaacccaaggacaccctcatgatctcccggacccctgaggtcacatgcgtggtggtggacgtgagccacgaagaccctgaggtcaagttcaactggtacgtggacggcgtggaggtgcataatgccaagacaaagccgctcgaggagcagtacaacgccacgtaccgtgtggtcagcgtcctcaccgtcctgcaccaggactggctgaatggcaaggagtacaagtgcaaggtctccaacaaagccctcccagcccccatcgcggaaaccatctccaaagccaaagggcagccccgagaaccacaggtgtacaccctgcccccatcccgggatgagctgaccaagaaccaggtcagcctgacctgcctggtcaaaggcttctatcccagcgacatcgccgtggagtgggagagcaatgggcagccggagaacaactacaagaccacgcctcccgtgctggactccgacggctccttcttcctctacagcaagctcaccgtggacaagagcaggtggcagcaggggaacgtcttctcatgctccgtgatgcatgaggctctgcacaaccactacacgcagaagagcctctccctgtctccgggtaaatga

SEQ ID NO: 102 - protein, 330 aa, Artificial Sequence
  Description of the artificial sequence: amino acid sequence of IgG1_S298A/E333A/R292L/K334E CH
ASTKGPSVFPLAPSSKSTSGGTAALGCLVKDYFPEPVTVSWNSGALTSGVHTFPAVLQSSGLYSLSSVVTVPSSSLGTQTYICNVNHKPSNTKVDKKVEPKSCDKTHTCPPCPAPELLGGPSVFLFPPKPKDTLMISRTPEVTCVVVDVSHEDPEVKFNWYVDGVEVHNAKTKPLEEQYNATYRVVSVLTVLHQDWLNGKEYKCKVSNKALPAPIAETISKAKGQPREPQVYTLPPSRDELTKNQVSLTCLVKGFYPSDIAVEWESNGQPENNYKTTPPVLDSDGSFFLYSKLTVDKSRWQQGNVFSCSVMHEALHNHYTQKSLSLSPGK

SEQ ID NO: 103 - DNA, 993 bp, Artificial Sequence
  Description of the artificial sequence: base sequence of IgG1_AAA_P329R CH
gctagcaccaagggcccatcggtcttccccctggcaccctcctccaagagcacctctgggggcacagcggccctgggctgcctggtcaaggactacttccccgaaccggtgacggtgtcgtggaactcaggcgccctgaccagcggcgtgcacaccttcccggctgtcctacagtcctcaggactctactccctcagcagcgtggtgaccgtgccctccagcagcttgggcacccagacctacatctgcaacgtgaatcacaagcccagcaacaccaaggtggacaagaaagttgagcccaaatcttgtgacaaaactcacacatgcccaccgtgcccagcacctgaactcctggggggaccgtcagtcttcctcttccccccaaaacccaaggacaccctcatgatctcccggacccctgaggtcacatgcgtggtggtggacgtgagccacgaagaccctgaggtcaagttcaactggtacgtggacggcgtggaggtgcataatgccaagacaaagccgcgggaggagcagtacaacgccacgtaccgtgtggtcagcgtcctcaccgtcctgcaccaggactggctgaatggcaaggagtacaagtgcaaggtctccaacaaagccctccgagcccccatcgcggcaaccatctccaaagccaaagggcagccccgagaaccacaggtgtacaccctgcccccatcccgggatgagctgaccaagaaccaggtcagcctgacctgcctggtcaaaggcttctatcccagcgacatcgccgtggagtgggagagcaatgggcagccggagaacaactacaagaccacgcctcccgtgctggactccgacggctccttcttcctctacagcaagctcaccgtggacaagagcaggtggcagcaggggaacgtcttctcatgctccgtgatgcatgaggctctgcacaaccactacacgcagaagagcctctccctgtctccgggtaaatga

SEQ ID NO: 104 - protein, 330 aa, Artificial Sequence
  Description of the artificial sequence: amino acid sequence of IgG1_AAA_P329R CH
ASTKGPSVFPLAPSSKSTSGGTAALGCLVKDYFPEPVTVSWNSGALTSGVHTFPAVLQSSGLYSLSSVVTVPSSSLGTQTYICNVNHKPSNTKVDKKVEPKSCDKTHTCPPCPAPELLGGPSVFLFPPKPKDTLMISRTPEVTCVVVDVSHEDPEVKFNWYVDGVEVHNAKTKPREEQYNATYRVVSVLTVLHQDWLNGKEYKCKVSNKALRAPIAATISKAKGQPREPQVYTLPPSRDELTKNQVSLTCLVKGFYPSDIAVEWESNGQPENNYKTTPPVLDSDGSFFLYSKLTVDKSRWQQGNVFSCSVMHEALHNHYTQKSLSLSPGK

SEQ ID NO: 105 - DNA, 993 bp, Artificial Sequence
  Description of the artificial sequence: base sequence of IgG1_AAA_A330F CH
gctagcaccaagggcccatcggtcttccccctggcaccctcctccaagagcacctctgggggcacagcggccctgggctgcctggtcaaggactacttccccgaaccggtgacggtgtcgtggaactcaggcgccctgaccagcggcgtgcacaccttcccggctgtcctacagtcctcaggactctactccctcagcagcgtggtgaccgtgccctccagcagcttgggcacccagacctacatctgcaacgtgaatcacaagcccagcaacaccaaggtggacaagaaagttgagcccaaatcttgtgacaaaactcacacatgcccaccgtgcccagcacctgaactcctggggggaccgtcagtcttcctcttccccccaaaacccaaggacaccctcatgatctcccggacccctgaggtcacatgcgtggtggtggacgtgagccacgaagaccctgaggtcaagttcaactggtacgtggacggcgtggaggtgcataatgccaagacaaagccgcgggaggagcagtacaacgccacgtaccgtgtggtcagcgtcctcaccgtcctgcaccaggactggctgaatggcaaggagtacaagtgcaaggtctccaacaaagccctcccattccccatcgcggcaaccatctccaaagccaaagggcagccccgagaaccacaggtgtacaccctgcccccatcccgggatgagctgaccaagaaccaggtcagcctgacctgcctggtcaaaggcttctatcccagcgacatcgccgtggagtgggagagcaatgggcagccggagaacaactacaagaccacgcctcccgtgctggactccgacggctccttcttcctctacagcaagctcaccgtggacaagagcaggtggcagcaggggaacgtcttctcatgctccgtgatgcatgaggctctgcacaaccactacacgcagaagagcctctccctgtctccgggtaaatga

SEQ ID NO: 106 - protein, 330 aa, Artificial Sequence
  Description of the artificial sequence: amino acid sequence of IgG1_AAA_A330F CH
ASTKGPSVFPLAPSSKSTSGGTAALGCLVKDYFPEPVTVSWNSGALTSGVHTFPAVLQSSGLYSLSSVVTVPSSSLGTQTYICNVNHKPSNTKVDKKVEPKSCDKTHTCPPCPAPELLGGPSVFLFPPKPKDTLMISRTPEVTCVVVDVSHEDPEVKFNWYVDGVEVHNAKTKPREEQYNATYRVVSVLTVLHQDWLNGKEYKCKVSNKALPFPIAATISKAKGQPREPQVYTLPPSRDELTKNQVSLTCLVKGFYPSDIAVEWESNGQPENNYKTTPPVLDSDGSFFLYSKLTVDKSRWQQGNVFSCSVMHEALHNHYTQKSLSLSPGK

SEQ ID NO: 107 - DNA, 993 bp, Artificial Sequence
  Description of the artificial sequence: base sequence of IgG1_S298A/E333A/K334E  CH
gctagcaccaagggcccatcggtcttccccctggcaccctcctccaagagcacctctgggggcacagcggccctgggctgcctggtcaaggactacttccccgaaccggtgacggtgtcgtggaactcaggcgccctgaccagcggcgtgcacaccttcccggctgtcctacagtcctcaggactctactccctcagcagcgtggtgaccgtgccctccagcagcttgggcacccagacctacatctgcaacgtgaatcacaagcccagcaacaccaaggtggacaagaaagttgagcccaaatcttgtgacaaaactcacacatgcccaccgtgcccagcacctgaactcctggggggaccgtcagtcttcctcttccccccaaaacccaaggacaccctcatgatctcccggacccctgaggtcacatgcgtggtggtggacgtgagccacgaagaccctgaggtcaagttcaactggtacgtggacggcgtggaggtgcataatgccaagacaaagccgcgggaggagcagtacaacgccacgtaccgtgtggtcagcgtcctcaccgtcctgcaccaggactggctgaatggcaaggagtacaagtgcaaggtctccaacaaagccctcccagcccccatcgcggaaaccatctccaaagccaaagggcagccccgagaaccacaggtgtacaccctgcccccatcccgggatgagctgaccaagaaccaggtcagcctgacctgcctggtcaaaggcttctatcccagcgacatcgccgtggagtgggagagcaatgggcagccggagaacaactacaagaccacgcctcccgtgctggactccgacggctccttcttcctctacagcaagctcaccgtggacaagagcaggtggcagcaggggaacgtcttctcatgctccgtgatgcatgaggctctgcacaaccactacacgcagaagagcctctccctgtctccgggtaaatga

SEQ ID NO: 108 - protein, 330 aa, Artificial Sequence
  Description of the artificial sequence: amino acid sequence of IgG1_S298A/E333A/K334E  CH
ASTKGPSVFPLAPSSKSTSGGTAALGCLVKDYFPEPVTVSWNSGALTSGVHTFPAVLQSSGLYSLSSVVTVPSSSLGTQTYICNVNHKPSNTKVDKKVEPKSCDKTHTCPPCPAPELLGGPSVFLFPPKPKDTLMISRTPEVTCVVVDVSHEDPEVKFNWYVDGVEVHNAKTKPREEQYNATYRVVSVLTVLHQDWLNGKEYKCKVSNKALPAPIAETISKAKGQPREPQVYTLPPSRDELTKNQVSLTCLVKGFYPSDIAVEWESNGQPENNYKTTPPVLDSDGSFFLYSKLTVDKSRWQQGNVFSCSVMHEALHNHYTQKSLSLSPGK

SEQ ID NO: 109 - DNA, 993 bp, Artificial Sequence
  Description of the artificial sequence: base sequence of IgG1_AAA_A339T CH
gctagcaccaagggcccatcggtcttccccctggcaccctcctccaagagcacctctgggggcacagcggccctgggctgcctggtcaaggactacttccccgaaccggtgacggtgtcgtggaactcaggcgccctgaccagcggcgtgcacaccttcccggctgtcctacagtcctcaggactctactccctcagcagcgtggtgaccgtgccctccagcagcttgggcacccagacctacatctgcaacgtgaatcacaagcccagcaacaccaaggtggacaagaaagttgagcccaaatcttgtgacaaaactcacacatgcccaccgtgcccagcacctgaactcctggggggaccgtcagtcttcctcttccccccaaaacccaaggacaccctcatgatctcccggacccctgaggtcacatgcgtggtggtggacgtgagccacgaagaccctgaggtcaagttcaactggtacgtggacggcgtggaggtgcataatgccaagacaaagccgcgggaggagcagtacaacgccacgtaccgtgtggtcagcgtcctcaccgtcctgcaccaggactggctgaatggcaaggagtacaagtgcaaggtctccaacaaagccctcccagcccccatcgcggcaaccatctccaaaaccaaagggcagccccgagaaccacaggtgtacaccctgcccccatcccgggatgagctgaccaagaaccaggtcagcctgacctgcctggtcaaaggcttctatcccagcgacatcgccgtggagtgggagagcaatgggcagccggagaacaactacaagaccacgcctcccgtgctggactccgacggctccttcttcctctacagcaagctcaccgtggacaagagcaggtggcagcaggggaacgtcttctcatgctccgtgatgcatgaggctctgcacaaccactacacgcagaagagcctctccctgtctccgggtaaatga

SEQ ID NO: 110 - protein, 330 aa, Artificial Sequence
  Description of the artificial sequence: amino acid sequence of IgG1_AAA_A339T CH
ASTKGPSVFPLAPSSKSTSGGTAALGCLVKDYFPEPVTVSWNSGALTSGVHTFPAVLQSSGLYSLSSVVTVPSSSLGTQTYICNVNHKPSNTKVDKKVEPKSCDKTHTCPPCPAPELLGGPSVFLFPPKPKDTLMISRTPEVTCVVVDVSHEDPEVKFNWYVDGVEVHNAKTKPREEQYNATYRVVSVLTVLHQDWLNGKEYKCKVSNKALPAPIAATISKTKGQPREPQVYTLPPSRDELTKNQVSLTCLVKGFYPSDIAVEWESNGQPENNYKTTPPVLDSDGSFFLYSKLTVDKSRWQQGNVFSCSVMHEALHNHYTQKSLSLSPGK

SEQ ID NO: 111 - DNA, 993 bp, Artificial Sequence
  Description of the artificial sequence: base sequence of IgG1_AAA_F372Y CH
gctagcaccaagggcccatcggtcttccccctggcaccctcctccaagagcacctctgggggcacagcggccctgggctgcctggtcaaggactacttccccgaaccggtgacggtgtcgtggaactcaggcgccctgaccagcggcgtgcacaccttcccggctgtcctacagtcctcaggactctactccctcagcagcgtggtgaccgtgccctccagcagcttgggcacccagacctacatctgcaacgtgaatcacaagcccagcaacaccaaggtggacaagaaagttgagcccaaatcttgtgacaaaactcacacatgcccaccgtgcccagcacctgaactcctggggggaccgtcagtcttcctcttccccccaaaacccaaggacaccctcatgatctcccggacccctgaggtcacatgcgtggtggtggacgtgagccacgaagaccctgaggtcaagttcaactggtacgtggacggcgtggaggtgcataatgccaagacaaagccgcgggaggagcagtacaacgccacgtaccgtgtggtcagcgtcctcaccgtcctgcaccaggactggctgaatggcaaggagtacaagtgcaaggtctccaacaaagccctcccagcccccatcgcggcaaccatctccaaagccaaagggcagccccgagaaccacaggtgtacaccctgcccccatcccgggatgagctgaccaagaaccaggtcagcctgacctgcctggtcaaaggctactatcccagcgacatcgccgtggagtgggagagcaatgggcagccggagaacaactacaagaccacgcctcccgtgctggactccgacggctccttcttcctctacagcaagctcaccgtggacaagagcaggtggcagcaggggaacgtcttctcatgctccgtgatgcatgaggctctgcacaaccactacacgcagaagagcctctccctgtctccgggtaaatga

SEQ ID NO: 112 - protein, 330 aa, Artificial Sequence
  Description of the artificial sequence: amino acid sequence of IgG1_AAA_F372Y CH
ASTKGPSVFPLAPSSKSTSGGTAALGCLVKDYFPEPVTVSWNSGALTSGVHTFPAVLQSSGLYSLSSVVTVPSSSLGTQTYICNVNHKPSNTKVDKKVEPKSCDKTHTCPPCPAPELLGGPSVFLFPPKPKDTLMISRTPEVTCVVVDVSHEDPEVKFNWYVDGVEVHNAKTKPREEQYNATYRVVSVLTVLHQDWLNGKEYKCKVSNKALPAPIAATISKAKGQPREPQVYTLPPSRDELTKNQVSLTCLVKGYYPSDIAVEWESNGQPENNYKTTPPVLDSDGSFFLYSKLTVDKSRWQQGNVFSCSVMHEALHNHYTQKSLSLSPGK

SEQ ID NO: 113 - DNA, 993 bp, Artificial Sequence
  Description of the artificial sequence: base sequence of IgG1_AAA_V379M CH
gctagcaccaagggcccatcggtcttccccctggcaccctcctccaagagcacctctgggggcacagcggccctgggctgcctggtcaaggactacttccccgaaccggtgacggtgtcgtggaactcaggcgccctgaccagcggcgtgcacaccttcccggctgtcctacagtcctcaggactctactccctcagcagcgtggtgaccgtgccctccagcagcttgggcacccagacctacatctgcaacgtgaatcacaagcccagcaacaccaaggtggacaagaaagttgagcccaaatcttgtgacaaaactcacacatgcccaccgtgcccagcacctgaactcctggggggaccgtcagtcttcctcttccccccaaaacccaaggacaccctcatgatctcccggacccctgaggtcacatgcgtggtggtggacgtgagccacgaagaccctgaggtcaagttcaactggtacgtggacggcgtggaggtgcataatgccaagacaaagccgcgggaggagcagtacaacgccacgtaccgtgtggtcagcgtcctcaccgtcctgcaccaggactggctgaatggcaaggagtacaagtgcaaggtctccaacaaagccctcccagcccccatcgcggcaaccatctccaaagccaaagggcagccccgagaaccacaggtgtacaccctgcccccatcccgggatgagctgaccaagaaccaggtcagcctgacctgcctggtcaaaggcttctatcccagcgacatcgccatggagtgggagagcaatgggcagccggagaacaactacaagaccacgcctcccgtgctggactccgacggctccttcttcctctacagcaagctcaccgtggacaagagcaggtggcagcaggggaacgtcttctcatgctccgtgatgcatgaggctctgcacaaccactacacgcagaagagcctctccctgtctccgggtaaatga

SEQ ID NO: 114 - protein, 330 aa, Artificial Sequence
  Description of the artificial sequence: amino acid sequence of IgG1_AAA_V379M CH
ASTKGPSVFPLAPSSKSTSGGTAALGCLVKDYFPEPVTVSWNSGALTSGVHTFPAVLQSSGLYSLSSVVTVPSSSLGTQTYICNVNHKPSNTKVDKKVEPKSCDKTHTCPPCPAPELLGGPSVFLFPPKPKDTLMISRTPEVTCVVVDVSHEDPEVKFNWYVDGVEVHNAKTKPREEQYNATYRVVSVLTVLHQDWLNGKEYKCKVSNKALPAPIAATISKAKGQPREPQVYTLPPSRDELTKNQVSLTCLVKGFYPSDIAMEWESNGQPENNYKTTPPVLDSDGSFFLYSKLTVDKSRWQQGNVFSCSVMHEALHNHYTQKSLSLSPGK

SEQ ID NO: 115 - DNA, 993 bp, Artificial Sequence
  Description of the artificial sequence: base sequence of IgG1_AAA_S239D/I332E CH
gctagcaccaagggcccatcggtcttccccctggcaccctcctccaagagcacctctgggggcacagcggccctgggctgcctggtcaaggactacttccccgaaccggtgacggtgtcgtggaactcaggcgccctgaccagcggcgtgcacaccttcccggctgtcctacagtcctcaggactctactccctcagcagcgtggtgaccgtgccctccagcagcttgggcacccagacctacatctgcaacgtgaatcacaagcccagcaacaccaaggtggacaagaaagttgagcccaaatcttgtgacaaaactcacacatgcccaccgtgcccagcacctgaactcctggggggaccggatgtcttcctcttccccccaaaacccaaggacaccctcatgatctcccggacccctgaggtcacatgcgtggtggtggacgtgagccacgaagaccctgaggtcaagttcaactggtacgtggacggcgtggaggtgcataatgccaagacaaagccgcgggaggagcagtacaacgccacgtaccgtgtggtcagcgtcctcaccgtcctgcaccaggactggctgaatggcaaggagtacaagtgcaaggtctccaacaaagccctcccagcccccgaagcggcaaccatctccaaagccaaagggcagccccgagaaccacaggtgtacaccctgcccccatcccgggatgagctgaccaagaaccaggtcagcctgacctgcctggtcaaaggcttctatcccagcgacatcgccgtggagtgggagagcaatgggcagccggagaacaactacaagaccacgcctcccgtgctggactccgacggctccttcttcctctacagcaagctcaccgtggacaagagcaggtggcagcaggggaacgtcttctcatgctccgtgatgcatgaggctctgcacaaccactacacgcagaagagcctctccctgtctccgggtaaatga

SEQ ID NO: 116 - protein, 330 aa, Artificial Sequence
  Description of the artificial sequence: amino acid sequence of IgG1_AAA_S239D/I332E CH
ASTKGPSVFPLAPSSKSTSGGTAALGCLVKDYFPEPVTVSWNSGALTSGVHTFPAVLQSSGLYSLSSVVTVPSSSLGTQTYICNVNHKPSNTKVDKKVEPKSCDKTHTCPPCPAPELLGGPDVFLFPPKPKDTLMISRTPEVTCVVVDVSHEDPEVKFNWYVDGVEVHNAKTKPREEQYNATYRVVSVLTVLHQDWLNGKEYKCKVSNKALPAPEAATISKAKGQPREPQVYTLPPSRDELTKNQVSLTCLVKGFYPSDIAVEWESNGQPENNYKTTPPVLDSDGSFFLYSKLTVDKSRWQQGNVFSCSVMHEALHNHYTQKSLSLSPGK

SEQ ID NO: 117 - DNA, 993 bp, Artificial Sequence
  Description of the artificial sequence: base sequence of IgG1_AAA_E283L CH
gctagcaccaagggcccatcggtcttccccctggcaccctcctccaagagcacctctgggggcacagcggccctgggctgcctggtcaaggactacttccccgaaccggtgacggtgtcgtggaactcaggcgccctgaccagcggcgtgcacaccttcccggctgtcctacagtcctcaggactctactccctcagcagcgtggtgaccgtgccctccagcagcttgggcacccagacctacatctgcaacgtgaatcacaagcccagcaacaccaaggtggacaagaaagttgagcccaaatcttgtgacaaaactcacacatgcccaccgtgcccagcacctgaactcctggggggaccgtcagtcttcctcttccccccaaaacccaaggacaccctcatgatctcccggacccctgaggtcacatgcgtggtggtggacgtgagccacgaagaccctgaggtcaagttcaactggtacgtggacggcgtgctcgtgcataatgccaagacaaagccgcgggaggagcagtacaacgccacgtaccgtgtggtcagcgtcctcaccgtcctgcaccaggactggctgaatggcaaggagtacaagtgcaaggtctccaacaaagccctcccagcccccatcgcggcaaccatctccaaagccaaagggcagccccgagaaccacaggtgtacaccctgcccccatcccgggatgagctgaccaagaaccaggtcagcctgacctgcctggtcaaaggcttctatcccagcgacatcgccgtggagtgggagagcaatgggcagccggagaacaactacaagaccacgcctcccgtgctggactccgacggctccttcttcctctacagcaagctcaccgtggacaagagcaggtggcagcaggggaacgtcttctcatgctccgtgatgcatgaggctctgcacaaccactacacgcagaagagcctctccctgtctccgggtaaatga

SEQ ID NO: 118 - protein, 330 aa, Artificial Sequence
  Description of the artificial sequence: amino acid sequence of IgG1_AAA_E283L CH
ASTKGPSVFPLAPSSKSTSGGTAALGCLVKDYFPEPVTVSWNSGALTSGVHTFPAVLQSSGLYSLSSVVTVPSSSLGTQTYICNVNHKPSNTKVDKKVEPKSCDKTHTCPPCPAPELLGGPSVFLFPPKPKDTLMISRTPEVTCVVVDVSHEDPEVKFNWYVDGVLVHNAKTKPREEQYNATYRVVSVLTVLHQDWLNGKEYKCKVSNKALPAPIAATISKAKGQPREPQVYTLPPSRDELTKNQVSLTCLVKGFYPSDIAVEWESNGQPENNYKTTPPVLDSDGSFFLYSKLTVDKSRWQQGNVFSCSVMHEALHNHYTQKSLSLSPGK

SEQ ID NO: 119 - DNA, 993 bp, Artificial Sequence
  Description of the artificial sequence: base sequence of IgG1_S298T/E333A/K334A CH
gctagcaccaagggcccatcggtcttccccctggcaccctcctccaagagcacctctgggggcacagcggccctgggctgcctggtcaaggactacttccccgaaccggtgacggtgtcgtggaactcaggcgccctgaccagcggcgtgcacaccttcccggctgtcctacagtcctcaggactctactccctcagcagcgtggtgaccgtgccctccagcagcttgggcacccagacctacatctgcaacgtgaatcacaagcccagcaacaccaaggtggacaagaaagttgagcccaaatcttgtgacaaaactcacacatgcccaccgtgcccagcacctgaactcctggggggaccgtcagtcttcctcttccccccaaaacccaaggacaccctcatgatctcccggacccctgaggtcacatgcgtggtggtggacgtgagccacgaagaccctgaggtcaagttcaactggtacgtggacggcgtggaggtgcataatgccaagacaaagccgcgggaggagcagtacaacaccacgtaccgtgtggtcagcgtcctcaccgtcctgcaccaggactggctgaatggcaaggagtacaagtgcaaggtctccaacaaagccctcccagcccccatcgcggcaaccatctccaaagccaaagggcagccccgagaaccacaggtgtacaccctgcccccatcccgggatgagctgaccaagaaccaggtcagcctgacctgcctggtcaaaggcttctatcccagcgacatcgccgtggagtgggagagcaatgggcagccggagaacaactacaagaccacgcctcccgtgctggactccgacggctccttcttcctctacagcaagctcaccgtggacaagagcaggtggcagcaggggaacgtcttctcatgctccgtgatgcatgaggctctgcacaaccactacacgcagaagagcctctccctgtctccgggtaaatga

SEQ ID NO: 120 - protein, 330 aa, Artificial Sequence
  Description of the artificial sequence: amino acid sequence of IgG1_S298T/E333A/K334A CH
ASTKGPSVFPLAPSSKSTSGGTAALGCLVKDYFPEPVTVSWNSGALTSGVHTFPAVLQSSGLYSLSSVVTVPSSSLGTQTYICNVNHKPSNTKVDKKVEPKSCDKTHTCPPCPAPELLGGPSVFLFPPKPKDTLMISRTPEVTCVVVDVSHEDPEVKFNWYVDGVEVHNAKTKPREEQYNTTYRVVSVLTVLHQDWLNGKEYKCKVSNKALPAPIAATISKAKGQPREPQVYTLPPSRDELTKNQVSLTCLVKGFYPSDIAVEWESNGQPENNYKTTPPVLDSDGSFFLYSKLTVDKSRWQQGNVFSCSVMHEALHNHYTQKSLSLSPGK

SEQ ID NO: 121 - DNA, 993 bp, Artificial Sequence
  Description of the artificial sequence: base sequence of IgG1_AAA_E294W CH
gctagcaccaagggcccatcggtcttccccctggcaccctcctccaagagcacctctgggggcacagcggccctgggctgcctggtcaaggactacttccccgaaccggtgacggtgtcgtggaactcaggcgccctgaccagcggcgtgcacaccttcccggctgtcctacagtcctcaggactctactccctcagcagcgtggtgaccgtgccctccagcagcttgggcacccagacctacatctgcaacgtgaatcacaagcccagcaacaccaaggtggacaagaaagttgagcccaaatcttgtgacaaaactcacacatgcccaccgtgcccagcacctgaactcctggggggaccgtcagtcttcctcttccccccaaaacccaaggacaccctcatgatctcccggacccctgaggtcacatgcgtggtggtggacgtgagccacgaagaccctgaggtcaagttcaactggtacgtggacggcgtggaggtgcataatgccaagacaaagccgcgggagtggcagtacaacgccacgtaccgtgtggtcagcgtcctcaccgtcctgcaccaggactggctgaatggcaaggagtacaagtgcaaggtctccaacaaagccctcccagcccccatcgcggcaaccatctccaaagccaaagggcagccccgagaaccacaggtgtacaccctgcccccatcccgggatgagctgaccaagaaccaggtcagcctgacctgcctggtcaaaggcttctatcccagcgacatcgccgtggagtgggagagcaatgggcagccggagaacaactacaagaccacgcctcccgtgctggactccgacggctccttcttcctctacagcaagctcaccgtggacaagagcaggtggcagcaggggaacgtcttctcatgctccgtgatgcatgaggctctgcacaaccactacacgcagaagagcctctccctgtctccgggtaaatga

SEQ ID NO: 122 - protein, 330 aa, Artificial Sequence
  Description of the artificial sequence: amino acid sequence of IgG1_AAA_E294W CH
ASTKGPSVFPLAPSSKSTSGGTAALGCLVKDYFPEPVTVSWNSGALTSGVHTFPAVLQSSGLYSLSSVVTVPSSSLGTQTYICNVNHKPSNTKVDKKVEPKSCDKTHTCPPCPAPELLGGPSVFLFPPKPKDTLMISRTPEVTCVVVDVSHEDPEVKFNWYVDGVEVHNAKTKPREWQYNATYRVVSVLTVLHQDWLNGKEYKCKVSNKALPAPIAATISKAKGQPREPQVYTLPPSRDELTKNQVSLTCLVKGFYPSDIAVEWESNGQPENNYKTTPPVLDSDGSFFLYSKLTVDKSRWQQGNVFSCSVMHEALHNHYTQKSLSLSPGK

SEQ ID NO: 123 - DNA, 993 bp, Artificial Sequence
  Description of the artificial sequence: base sequence of IgG1_AAA_Q295T CH
gctagcaccaagggcccatcggtcttccccctggcaccctcctccaagagcacctctgggggcacagcggccctgggctgcctggtcaaggactacttccccgaaccggtgacggtgtcgtggaactcaggcgccctgaccagcggcgtgcacaccttcccggctgtcctacagtcctcaggactctactccctcagcagcgtggtgaccgtgccctccagcagcttgggcacccagacctacatctgcaacgtgaatcacaagcccagcaacaccaaggtggacaagaaagttgagcccaaatcttgtgacaaaactcacacatgcccaccgtgcccagcacctgaactcctggggggaccgtcagtcttcctcttccccccaaaacccaaggacaccctcatgatctcccggacccctgaggtcacatgcgtggtggtggacgtgagccacgaagaccctgaggtcaagttcaactggtacgtggacggcgtggaggtgcataatgccaagacaaagccgcgggaggagacgtacaacgccacgtaccgtgtggtcagcgtcctcaccgtcctgcaccaggactggctgaatggcaaggagtacaagtgcaaggtctccaacaaagccctcccagcccccatcgcggcaaccatctccaaagccaaagggcagccccgagaaccacaggtgtacaccctgcccccatcccgggatgagctgaccaagaaccaggtcagcctgacctgcctggtcaaaggcttctatcccagcgacatcgccgtggagtgggagagcaatgggcagccggagaacaactacaagaccacgcctcccgtgctggactccgacggctccttcttcctctacagcaagctcaccgtggacaagagcaggtggcagcaggggaacgtcttctcatgctccgtgatgcatgaggctctgcacaaccactacacgcagaagagcctctccctgtctccgggtaaatga

SEQ ID NO: 124 - protein, 330 aa, Artificial Sequence
  Description of the artificial sequence: amino acid sequence of IgG1_AAA_Q295T CH
ASTKGPSVFPLAPSSKSTSGGTAALGCLVKDYFPEPVTVSWNSGALTSGVHTFPAVLQSSGLYSLSSVVTVPSSSLGTQTYICNVNHKPSNTKVDKKVEPKSCDKTHTCPPCPAPELLGGPSVFLFPPKPKDTLMISRTPEVTCVVVDVSHEDPEVKFNWYVDGVEVHNAKTKPREETYNATYRVVSVLTVLHQDWLNGKEYKCKVSNKALPAPIAATISKAKGQPREPQVYTLPPSRDELTKNQVSLTCLVKGFYPSDIAVEWESNGQPENNYKTTPPVLDSDGSFFLYSKLTVDKSRWQQGNVFSCSVMHEALHNHYTQKSLSLSPGK

SEQ ID NO: 125 - DNA, 993 bp, Artificial Sequence
  Description of the artificial sequence: base sequence of IgG1_AAA_A327D CH
gctagcaccaagggcccatcggtcttccccctggcaccctcctccaagagcacctctgggggcacagcggccctgggctgcctggtcaaggactacttccccgaaccggtgacggtgtcgtggaactcaggcgccctgaccagcggcgtgcacaccttcccggctgtcctacagtcctcaggactctactccctcagcagcgtggtgaccgtgccctccagcagcttgggcacccagacctacatctgcaacgtgaatcacaagcccagcaacaccaaggtggacaagaaagttgagcccaaatcttgtgacaaaactcacacatgcccaccgtgcccagcacctgaactcctggggggaccgtcagtcttcctcttccccccaaaacccaaggacaccctcatgatctcccggacccctgaggtcacatgcgtggtggtggacgtgagccacgaagaccctgaggtcaagttcaactggtacgtggacggcgtggaggtgcataatgccaagacaaagccgcgggaggagcagtacaacgccacgtaccgtgtggtcagcgtcctcaccgtcctgcaccaggactggctgaatggcaaggagtacaagtgcaaggtctccaacaaagacctcccagcccccatcgcggcaaccatctccaaagccaaagggcagccccgagaaccacaggtgtacaccctgcccccatcccgggatgagctgaccaagaaccaggtcagcctgacctgcctggtcaaaggcttctatcccagcgacatcgccgtggagtgggagagcaatgggcagccggagaacaactacaagaccacgcctcccgtgctggactccgacggctccttcttcctctacagcaagctcaccgtggacaagagcaggtggcagcaggggaacgtcttctcatgctccgtgatgcatgaggctctgcacaaccactacacgcagaagagcctctccctgtctccgggtaaatga

SEQ ID NO: 126 - protein, 330 aa, Artificial Sequence
  Description of the artificial sequence: amino acid sequence of IgG1_AAA_A327D CH
ASTKGPSVFPLAPSSKSTSGGTAALGCLVKDYFPEPVTVSWNSGALTSGVHTFPAVLQSSGLYSLSSVVTVPSSSLGTQTYICNVNHKPSNTKVDKKVEPKSCDKTHTCPPCPAPELLGGPSVFLFPPKPKDTLMISRTPEVTCVVVDVSHEDPEVKFNWYVDGVEVHNAKTKPREEQYNATYRVVSVLTVLHQDWLNGKEYKCKVSNKDLPAPIAATISKAKGQPREPQVYTLPPSRDELTKNQVSLTCLVKGFYPSDIAVEWESNGQPENNYKTTPPVLDSDGSFFLYSKLTVDKSRWQQGNVFSCSVMHEALHNHYTQKSLSLSPGK

SEQ ID NO: 127 - DNA, 993 bp, Artificial Sequence
  Description of the artificial sequence: base sequence of IgG1_AAA_L235T CH
gctagcaccaagggcccatcggtcttccccctggcaccctcctccaagagcacctctgggggcacagcggccctgggctgcctggtcaaggactacttccccgaaccggtgacggtgtcgtggaactcaggcgccctgaccagcggcgtgcacaccttcccggctgtcctacagtcctcaggactctactccctcagcagcgtggtgaccgtgccctccagcagcttgggcacccagacctacatctgcaacgtgaatcacaagcccagcaacaccaaggtggacaagaaagttgagcccaaatcttgtgacaaaactcacacatgcccaccgtgcccagcacctgaactcacggggggaccgtcagtcttcctcttccccccaaaacccaaggacaccctcatgatctcccggacccctgaggtcacatgcgtggtggtggacgtgagccacgaagaccctgaggtcaagttcaactggtacgtggacggcgtggaggtgcataatgccaagacaaagccgcgggaggagcagtacaacgccacgtaccgtgtggtcagcgtcctcaccgtcctgcaccaggactggctgaatggcaaggagtacaagtgcaaggtctccaacaaagccctcccagcccccatcgcggcaaccatctccaaagccaaagggcagccccgagaaccacaggtgtacaccctgcccccatcccgggatgagctgaccaagaaccaggtcagcctgacctgcctggtcaaaggcttctatcccagcgacatcgccgtggagtgggagagcaatgggcagccggagaacaactacaagaccacgcctcccgtgctggactccgacggctccttcttcctctacagcaagctcaccgtggacaagagcaggtggcagcaggggaacgtcttctcatgctccgtgatgcatgaggctctgcacaaccactacacgcagaagagcctctccctgtctccgggtaaatga

SEQ ID NO: 128 - protein, 330 aa, Artificial Sequence
  Description of the artificial sequence: amino acid sequence of IgG1_AAA_L235T CH
ASTKGPSVFPLAPSSKSTSGGTAALGCLVKDYFPEPVTVSWNSGALTSGVHTFPAVLQSSGLYSLSSVVTVPSSSLGTQTYICNVNHKPSNTKVDKKVEPKSCDKTHTCPPCPAPELTGGPSVFLFPPKPKDTLMISRTPEVTCVVVDVSHEDPEVKFNWYVDGVEVHNAKTKPREEQYNATYRVVSVLTVLHQDWLNGKEYKCKVSNKALPAPIAATISKAKGQPREPQVYTLPPSRDELTKNQVSLTCLVKGFYPSDIAVEWESNGQPENNYKTTPPVLDSDGSFFLYSKLTVDKSRWQQGNVFSCSVMHEALHNHYTQKSLSLSPGK

SEQ ID NO: 129 - DNA, 993 bp, Artificial Sequence
  Description of the artificial sequence: base sequence of IgG1_AAA_G236S CH
gctagcaccaagggcccatcggtcttccccctggcaccctcctccaagagcacctctgggggcacagcggccctgggctgcctggtcaaggactacttccccgaaccggtgacggtgtcgtggaactcaggcgccctgaccagcggcgtgcacaccttcccggctgtcctacagtcctcaggactctactccctcagcagcgtggtgaccgtgccctccagcagcttgggcacccagacctacatctgcaacgtgaatcacaagcccagcaacaccaaggtggacaagaaagttgagcccaaatcttgtgacaaaactcacacatgcccaccgtgcccagcacctgaactcctgagcggaccgtcagtcttcctcttccccccaaaacccaaggacaccctcatgatctcccggacccctgaggtcacatgcgtggtggtggacgtgagccacgaagaccctgaggtcaagttcaactggtacgtggacggcgtggaggtgcataatgccaagacaaagccgcgggaggagcagtacaacgccacgtaccgtgtggtcagcgtcctcaccgtcctgcaccaggactggctgaatggcaaggagtacaagtgcaaggtctccaacaaagccctcccagcccccatcgcggcaaccatctccaaagccaaagggcagccccgagaaccacaggtgtacaccctgcccccatcccgggatgagctgaccaagaaccaggtcagcctgacctgcctggtcaaaggcttctatcccagcgacatcgccgtggagtgggagagcaatgggcagccggagaacaactacaagaccacgcctcccgtgctggactccgacggctccttcttcctctacagcaagctcaccgtggacaagagcaggtggcagcaggggaacgtcttctcatgctccgtgatgcatgaggctctgcacaaccactacacgcagaagagcctctccctgtctccgggtaaatga

SEQ ID NO: 130 - protein, 330 aa, Artificial Sequence
  Description of the artificial sequence: amino acid sequence of IgG1_AAA_G236S CH
ASTKGPSVFPLAPSSKSTSGGTAALGCLVKDYFPEPVTVSWNSGALTSGVHTFPAVLQSSGLYSLSSVVTVPSSSLGTQTYICNVNHKPSNTKVDKKVEPKSCDKTHTCPPCPAPELLSGPSVFLFPPKPKDTLMISRTPEVTCVVVDVSHEDPEVKFNWYVDGVEVHNAKTKPREEQYNATYRVVSVLTVLHQDWLNGKEYKCKVSNKALPAPIAATISKAKGQPREPQVYTLPPSRDELTKNQVSLTCLVKGFYPSDIAVEWESNGQPENNYKTTPPVLDSDGSFFLYSKLTVDKSRWQQGNVFSCSVMHEALHNHYTQKSLSLSPGK

SEQ ID NO: 131 - DNA, 993 bp, Artificial Sequence
  Description of the artificial sequence: base sequence of IgG1_AAA_S239D CH
gctagcaccaagggcccatcggtcttccccctggcaccctcctccaagagcacctctgggggcacagcggccctgggctgcctggtcaaggactacttccccgaaccggtgacggtgtcgtggaactcaggcgccctgaccagcggcgtgcacaccttcccggctgtcctacagtcctcaggactctactccctcagcagcgtggtgaccgtgccctccagcagcttgggcacccagacctacatctgcaacgtgaatcacaagcccagcaacaccaaggtggacaagaaagttgagcccaaatcttgtgacaaaactcacacatgcccaccgtgcccagcacctgaactcctggggggaccggatgtcttcctcttccccccaaaacccaaggacaccctcatgatctcccggacccctgaggtcacatgcgtggtggtggacgtgagccacgaagaccctgaggtcaagttcaactggtacgtggacggcgtggaggtgcataatgccaagacaaagccgcgggaggagcagtacaacgccacgtaccgtgtggtcagcgtcctcaccgtcctgcaccaggactggctgaatggcaaggagtacaagtgcaaggtctccaacaaagccctcccagcccccatcgcggcaaccatctccaaagccaaagggcagccccgagaaccacaggtgtacaccctgcccccatcccgggatgagctgaccaagaaccaggtcagcctgacctgcctggtcaaaggcttctatcccagcgacatcgccgtggagtgggagagcaatgggcagccggagaacaactacaagaccacgcctcccgtgctggactccgacggctccttcttcctctacagcaagctcaccgtggacaagagcaggtggcagcaggggaacgtcttctcatgctccgtgatgcatgaggctctgcacaaccactacacgcagaagagcctctccctgtctccgggtaaatga

SEQ ID NO: 132 - protein, 330 aa, Artificial Sequence
  Description of the artificial sequence: amino acid sequence of IgG1_AAA_S239D CH
ASTKGPSVFPLAPSSKSTSGGTAALGCLVKDYFPEPVTVSWNSGALTSGVHTFPAVLQSSGLYSLSSVVTVPSSSLGTQTYICNVNHKPSNTKVDKKVEPKSCDKTHTCPPCPAPELLGGPDVFLFPPKPKDTLMISRTPEVTCVVVDVSHEDPEVKFNWYVDGVEVHNAKTKPREEQYNATYRVVSVLTVLHQDWLNGKEYKCKVSNKALPAPIAATISKAKGQPREPQVYTLPPSRDELTKNQVSLTCLVKGFYPSDIAVEWESNGQPENNYKTTPPVLDSDGSFFLYSKLTVDKSRWQQGNVFSCSVMHEALHNHYTQKSLSLSPGK

SEQ ID NO: 133 - DNA, 993 bp, Artificial Sequence
  Description of the artificial sequence: base sequence of IgG1_AAA_F243L CH
gctagcaccaagggcccatcggtcttccccctggcaccctcctccaagagcacctctgggggcacagcggccctgggctgcctggtcaaggactacttccccgaaccggtgacggtgtcgtggaactcaggcgccctgaccagcggcgtgcacaccttcccggctgtcctacagtcctcaggactctactccctcagcagcgtggtgaccgtgccctccagcagcttgggcacccagacctacatctgcaacgtgaatcacaagcccagcaacaccaaggtggacaagaaagttgagcccaaatcttgtgacaaaactcacacatgcccaccgtgcccagcacctgaactcctggggggaccgtcagtcttcctccttcccccaaaacccaaggacaccctcatgatctcccggacccctgaggtcacatgcgtggtggtggacgtgagccacgaagaccctgaggtcaagttcaactggtacgtggacggcgtggaggtgcataatgccaagacaaagccgcgggaggagcagtacaacgccacgtaccgtgtggtcagcgtcctcaccgtcctgcaccaggactggctgaatggcaaggagtacaagtgcaaggtctccaacaaagccctcccagcccccatcgcggcaaccatctccaaagccaaagggcagccccgagaaccacaggtgtacaccctgcccccatcccgggatgagctgaccaagaaccaggtcagcctgacctgcctggtcaaaggcttctatcccagcgacatcgccgtggagtgggagagcaatgggcagccggagaacaactacaagaccacgcctcccgtgctggactccgacggctccttcttcctctacagcaagctcaccgtggacaagagcaggtggcagcaggggaacgtcttctcatgctccgtgatgcatgaggctctgcacaaccactacacgcagaagagcctctccctgtctccgggtaaatga

SEQ ID NO: 134 - protein, 330 aa, Artificial Sequence
  Description of the artificial sequence: amino acid sequence of IgG1_AAA_F243L CH
ASTKGPSVFPLAPSSKSTSGGTAALGCLVKDYFPEPVTVSWNSGALTSGVHTFPAVLQSSGLYSLSSVVTVPSSSLGTQTYICNVNHKPSNTKVDKKVEPKSCDKTHTCPPCPAPELLGGPSVFLLPPKPKDTLMISRTPEVTCVVVDVSHEDPEVKFNWYVDGVEVHNAKTKPREEQYNATYRVVSVLTVLHQDWLNGKEYKCKVSNKALPAPIAATISKAKGQPREPQVYTLPPSRDELTKNQVSLTCLVKGFYPSDIAVEWESNGQPENNYKTTPPVLDSDGSFFLYSKLTVDKSRWQQGNVFSCSVMHEALHNHYTQKSLSLSPGK

SEQ ID NO: 135 - DNA, 993 bp, Artificial Sequence
  Description of the artificial sequence: base sequence of IgG1_AAA_K248M CH
gctagcaccaagggcccatcggtcttccccctggcaccctcctccaagagcacctctgggggcacagcggccctgggctgcctggtcaaggactacttccccgaaccggtgacggtgtcgtggaactcaggcgccctgaccagcggcgtgcacaccttcccggctgtcctacagtcctcaggactctactccctcagcagcgtggtgaccgtgccctccagcagcttgggcacccagacctacatctgcaacgtgaatcacaagcccagcaacaccaaggtggacaagaaagttgagcccaaatcttgtgacaaaactcacacatgcccaccgtgcccagcacctgaactcctggggggaccgtcagtcttcctcttccccccaaaacccatggacaccctcatgatctcccggacccctgaggtcacatgcgtggtggtggacgtgagccacgaagaccctgaggtcaagttcaactggtacgtggacggcgtggaggtgcataatgccaagacaaagccgcgggaggagcagtacaacgccacgtaccgtgtggtcagcgtcctcaccgtcctgcaccaggactggctgaatggcaaggagtacaagtgcaaggtctccaacaaagccctcccagcccccatcgcggcaaccatctccaaagccaaagggcagccccgagaaccacaggtgtacaccctgcccccatcccgggatgagctgaccaagaaccaggtcagcctgacctgcctggtcaaaggcttctatcccagcgacatcgccgtggagtgggagagcaatgggcagccggagaacaactacaagaccacgcctcccgtgctggactccgacggctccttcttcctctacagcaagctcaccgtggacaagagcaggtggcagcaggggaacgtcttctcatgctccgtgatgcatgaggctctgcacaaccactacacgcagaagagcctctccctgtctccgggtaaatga

SEQ ID NO: 136 - protein, 330 aa, Artificial Sequence
  Description of the artificial sequence: amino acid sequence of IgG1_AAA_K248M CH
ASTKGPSVFPLAPSSKSTSGGTAALGCLVKDYFPEPVTVSWNSGALTSGVHTFPAVLQSSGLYSLSSVVTVPSSSLGTQTYICNVNHKPSNTKVDKKVEPKSCDKTHTCPPCPAPELLGGPSVFLFPPKPMDTLMISRTPEVTCVVVDVSHEDPEVKFNWYVDGVEVHNAKTKPREEQYNATYRVVSVLTVLHQDWLNGKEYKCKVSNKALPAPIAATISKAKGQPREPQVYTLPPSRDELTKNQVSLTCLVKGFYPSDIAVEWESNGQPENNYKTTPPVLDSDGSFFLYSKLTVDKSRWQQGNVFSCSVMHEALHNHYTQKSLSLSPGK

SEQ ID NO: 137 - DNA, 993 bp, Artificial Sequence
  Description of the artificial sequence: base sequence of IgG1_AAA_E258H CH
gctagcaccaagggcccatcggtcttccccctggcaccctcctccaagagcacctctgggggcacagcggccctgggctgcctggtcaaggactacttccccgaaccggtgacggtgtcgtggaactcaggcgccctgaccagcggcgtgcacaccttcccggctgtcctacagtcctcaggactctactccctcagcagcgtggtgaccgtgccctccagcagcttgggcacccagacctacatctgcaacgtgaatcacaagcccagcaacaccaaggtggacaagaaagttgagcccaaatcttgtgacaaaactcacacatgcccaccgtgcccagcacctgaactcctggggggaccgtcagtcttcctcttccccccaaaacccaaggacaccctcatgatctcccggacccctcacgtcacatgcgtggtggtggacgtgagccacgaagaccctgaggtcaagttcaactggtacgtggacggcgtggaggtgcataatgccaagacaaagccgcgggaggagcagtacaacgccacgtaccgtgtggtcagcgtcctcaccgtcctgcaccaggactggctgaatggcaaggagtacaagtgcaaggtctccaacaaagccctcccagcccccatcgcggcaaccatctccaaagccaaagggcagccccgagaaccacaggtgtacaccctgcccccatcccgggatgagctgaccaagaaccaggtcagcctgacctgcctggtcaaaggcttctatcccagcgacatcgccgtggagtgggagagcaatgggcagccggagaacaactacaagaccacgcctcccgtgctggactccgacggctccttcttcctctacagcaagctcaccgtggacaagagcaggtggcagcaggggaacgtcttctcatgctccgtgatgcatgaggctctgcacaaccactacacgcagaagagcctctccctgtctccgggtaaatga

SEQ ID NO: 138 - protein, 330 aa, Artificial Sequence
  Description of the artificial sequence: amino acid sequence of IgG1_AAA_E258H CH
ASTKGPSVFPLAPSSKSTSGGTAALGCLVKDYFPEPVTVSWNSGALTSGVHTFPAVLQSSGLYSLSSVVTVPSSSLGTQTYICNVNHKPSNTKVDKKVEPKSCDKTHTCPPCPAPELLGGPSVFLFPPKPKDTLMISRTPHVTCVVVDVSHEDPEVKFNWYVDGVEVHNAKTKPREEQYNATYRVVSVLTVLHQDWLNGKEYKCKVSNKALPAPIAATISKAKGQPREPQVYTLPPSRDELTKNQVSLTCLVKGFYPSDIAVEWESNGQPENNYKTTPPVLDSDGSFFLYSKLTVDKSRWQQGNVFSCSVMHEALHNHYTQKSLSLSPGK

SEQ ID NO: 139 - DNA, 993 bp, Artificial Sequence
  Description of the artificial sequence: base sequence of IgG1_AAA_D265G CH
gctagcaccaagggcccatcggtcttccccctggcaccctcctccaagagcacctctgggggcacagcggccctgggctgcctggtcaaggactacttccccgaaccggtgacggtgtcgtggaactcaggcgccctgaccagcggcgtgcacaccttcccggctgtcctacagtcctcaggactctactccctcagcagcgtggtgaccgtgccctccagcagcttgggcacccagacctacatctgcaacgtgaatcacaagcccagcaacaccaaggtggacaagaaagttgagcccaaatcttgtgacaaaactcacacatgcccaccgtgcccagcacctgaactcctggggggaccgtcagtcttcctcttccccccaaaacccaaggacaccctcatgatctcccggacccctgaggtcacatgcgtggtggtgggcgtgagccacgaagaccctgaggtcaagttcaactggtacgtggacggcgtggaggtgcataatgccaagacaaagccgcgggaggagcagtacaacgccacgtaccgtgtggtcagcgtcctcaccgtcctgcaccaggactggctgaatggcaaggagtacaagtgcaaggtctccaacaaagccctcccagcccccatcgcggcaaccatctccaaagccaaagggcagccccgagaaccacaggtgtacaccctgcccccatcccgggatgagctgaccaagaaccaggtcagcctgacctgcctggtcaaaggcttctatcccagcgacatcgccgtggagtgggagagcaatgggcagccggagaacaactacaagaccacgcctcccgtgctggactccgacggctccttcttcctctacagcaagctcaccgtggacaagagcaggtggcagcaggggaacgtcttctcatgctccgtgatgcatgaggctctgcacaaccactacacgcagaagagcctctccctgtctccgggtaaatga

SEQ ID NO: 140 - protein, 330 aa, Artificial Sequence
  Description of the artificial sequence: amino acid sequence of IgG1_AAA_D265G CH
ASTKGPSVFPLAPSSKSTSGGTAALGCLVKDYFPEPVTVSWNSGALTSGVHTFPAVLQSSGLYSLSSVVTVPSSSLGTQTYICNVNHKPSNTKVDKKVEPKSCDKTHTCPPCPAPELLGGPSVFLFPPKPKDTLMISRTPEVTCVVVGVSHEDPEVKFNWYVDGVEVHNAKTKPREEQYNATYRVVSVLTVLHQDWLNGKEYKCKVSNKALPAPIAATISKAKGQPREPQVYTLPPSRDELTKNQVSLTCLVKGFYPSDIAVEWESNGQPENNYKTTPPVLDSDGSFFLYSKLTVDKSRWQQGNVFSCSVMHEALHNHYTQKSLSLSPGK

SEQ ID NO: 141 - DNA, 993 bp, Artificial Sequence
  Description of the artificial sequence: base sequence of IgG1_S239D CH
gctagcaccaagggcccatcggtcttccccctggcaccctcctccaagagcacctctgggggcacagcggccctgggctgcctggtcaaggactacttccccgaaccggtgacggtgtcgtggaactcaggcgccctgaccagcggcgtgcacaccttcccggctgtcctacagtcctcaggactctactccctcagcagcgtggtgaccgtgccctccagcagcttgggcacccagacctacatctgcaacgtgaatcacaagcccagcaacaccaaggtggacaagaaagttgagcccaaatcttgtgacaaaactcacacatgcccaccgtgcccagcacctgaactcctggggggaccggatgtcttcctcttccccccaaaacccaaggacaccctcatgatctcccggacccctgaggtcacatgcgtggtggtggacgtgagccacgaagaccctgaggtcaagttcaactggtacgtggacggcgtggaggtgcataatgccaagacaaagccgcgggaggagcagtacaacagcacgtaccgtgtggtcagcgtcctcaccgtcctgcaccaggactggctgaatggcaaggagtacaagtgcaaggtctccaacaaagccctcccagcccccatcgagaaaaccatctccaaagccaaagggcagccccgagaaccacaggtgtacaccctgcccccatcccgggatgagctgaccaagaaccaggtcagcctgacctgcctggtcaaaggcttctatcccagcgacatcgccgtggagtgggagagcaatgggcagccggagaacaactacaagaccacgcctcccgtgctggactccgacggctccttcttcctctacagcaagctcaccgtggacaagagcaggtggcagcaggggaacgtcttctcatgctccgtgatgcatgaggctctgcacaaccactacacgcagaagagcctctccctgtctccgggtaaatga

SEQ ID NO: 142 - protein, 330 aa, Artificial Sequence
  Description of the artificial sequence: amino acid sequence of IgG1_S239D CH
ASTKGPSVFPLAPSSKSTSGGTAALGCLVKDYFPEPVTVSWNSGALTSGVHTFPAVLQSSGLYSLSSVVTVPSSSLGTQTYICNVNHKPSNTKVDKKVEPKSCDKTHTCPPCPAPELLGGPDVFLFPPKPKDTLMISRTPEVTCVVVDVSHEDPEVKFNWYVDGVEVHNAKTKPREEQYNSTYRVVSVLTVLHQDWLNGKEYKCKVSNKALPAPIEKTISKAKGQPREPQVYTLPPSRDELTKNQVSLTCLVKGFYPSDIAVEWESNGQPENNYKTTPPVLDSDGSFFLYSKLTVDKSRWQQGNVFSCSVMHEALHNHYTQKSLSLSPGK

SEQ ID NO: 143 - DNA, 993 bp, Artificial Sequence
  Description of the artificial sequence: base sequence of IgG1_S239E CH
gctagcaccaagggcccatcggtcttccccctggcaccctcctccaagagcacctctgggggcacagcggccctgggctgcctggtcaaggactacttccccgaaccggtgacggtgtcgtggaactcaggcgccctgaccagcggcgtgcacaccttcccggctgtcctacagtcctcaggactctactccctcagcagcgtggtgaccgtgccctccagcagcttgggcacccagacctacatctgcaacgtgaatcacaagcccagcaacaccaaggtggacaagaaagttgagcccaaatcttgtgacaaaactcacacatgcccaccgtgcccagcacctgaactcctggggggaccggaagtcttcctcttccccccaaaacccaaggacaccctcatgatctcccggacccctgaggtcacatgcgtggtggtggacgtgagccacgaagaccctgaggtcaagttcaactggtacgtggacggcgtggaggtgcataatgccaagacaaagccgcgggaggagcagtacaacagcacgtaccgtgtggtcagcgtcctcaccgtcctgcaccaggactggctgaatggcaaggagtacaagtgcaaggtctccaacaaagccctcccagcccccatcgagaaaaccatctccaaagccaaagggcagccccgagaaccacaggtgtacaccctgcccccatcccgggatgagctgaccaagaaccaggtcagcctgacctgcctggtcaaaggcttctatcccagcgacatcgccgtggagtgggagagcaatgggcagccggagaacaactacaagaccacgcctcccgtgctggactccgacggctccttcttcctctacagcaagctcaccgtggacaagagcaggtggcagcaggggaacgtcttctcatgctccgtgatgcatgaggctctgcacaaccactacacgcagaagagcctctccctgtctccgggtaaatga

SEQ ID NO: 144 - protein, 330 aa, Artificial Sequence
  Description of the artificial sequence: amino acid sequence of IgG1_S239E CH
ASTKGPSVFPLAPSSKSTSGGTAALGCLVKDYFPEPVTVSWNSGALTSGVHTFPAVLQSSGLYSLSSVVTVPSSSLGTQTYICNVNHKPSNTKVDKKVEPKSCDKTHTCPPCPAPELLGGPEVFLFPPKPKDTLMISRTPEVTCVVVDVSHEDPEVKFNWYVDGVEVHNAKTKPREEQYNSTYRVVSVLTVLHQDWLNGKEYKCKVSNKALPAPIEKTISKAKGQPREPQVYTLPPSRDELTKNQVSLTCLVKGFYPSDIAVEWESNGQPENNYKTTPPVLDSDGSFFLYSKLTVDKSRWQQGNVFSCSVMHEALHNHYTQKSLSLSPGK

SEQ ID NO: 145 - DNA, 993 bp, Artificial Sequence
  Description of the artificial sequence: base sequence of IgG1_S239D/I332D CH
gctagcaccaagggcccatcggtcttccccctggcaccctcctccaagagcacctctgggggcacagcggccctgggctgcctggtcaaggactacttccccgaaccggtgacggtgtcgtggaactcaggcgccctgaccagcggcgtgcacaccttcccggctgtcctacagtcctcaggactctactccctcagcagcgtggtgaccgtgccctccagcagcttgggcacccagacctacatctgcaacgtgaatcacaagcccagcaacaccaaggtggacaagaaagttgagcccaaatcttgtgacaaaactcacacatgcccaccgtgcccagcacctgaactcctggggggaccggatgtcttcctcttccccccaaaacccaaggacaccctcatgatctcccggacccctgaggtcacatgcgtggtggtggacgtgagccacgaagaccctgaggtcaagttcaactggtacgtggacggcgtggaggtgcataatgccaagacaaagccgcgggaggagcagtacaacagcacgtaccgtgtggtcagcgtcctcaccgtcctgcaccaggactggctgaatggcaaggagtacaagtgcaaggtctccaacaaagccctcccagcccccgatgagaaaaccatctccaaagccaaagggcagccccgagaaccacaggtgtacaccctgcccccatcccgggatgagctgaccaagaaccaggtcagcctgacctgcctggtcaaaggcttctatcccagcgacatcgccgtggagtgggagagcaatgggcagccggagaacaactacaagaccacgcctcccgtgctggactccgacggctccttcttcctctacagcaagctcaccgtggacaagagcaggtggcagcaggggaacgtcttctcatgctccgtgatgcatgaggctctgcacaaccactacacgcagaagagcctctccctgtctccgggtaaatga

SEQ ID NO: 146 - protein, 330 aa, Artificial Sequence
  Description of the artificial sequence: amino acid sequence of IgG1_S239D/I332D CH
ASTKGPSVFPLAPSSKSTSGGTAALGCLVKDYFPEPVTVSWNSGALTSGVHTFPAVLQSSGLYSLSSVVTVPSSSLGTQTYICNVNHKPSNTKVDKKVEPKSCDKTHTCPPCPAPELLGGPDVFLFPPKPKDTLMISRTPEVTCVVVDVSHEDPEVKFNWYVDGVEVHNAKTKPREEQYNSTYRVVSVLTVLHQDWLNGKEYKCKVSNKALPAPDEKTISKAKGQPREPQVYTLPPSRDELTKNQVSLTCLVKGFYPSDIAVEWESNGQPENNYKTTPPVLDSDGSFFLYSKLTVDKSRWQQGNVFSCSVMHEALHNHYTQKSLSLSPGK

SEQ ID NO: 147 - DNA, 993 bp, Artificial Sequence
  Description of the artificial sequence: base sequence of IgG1_S239D/I332T CH
gctagcaccaagggcccatcggtcttccccctggcaccctcctccaagagcacctctgggggcacagcggccctgggctgcctggtcaaggactacttccccgaaccggtgacggtgtcgtggaactcaggcgccctgaccagcggcgtgcacaccttcccggctgtcctacagtcctcaggactctactccctcagcagcgtggtgaccgtgccctccagcagcttgggcacccagacctacatctgcaacgtgaatcacaagcccagcaacaccaaggtggacaagaaagttgagcccaaatcttgtgacaaaactcacacatgcccaccgtgcccagcacctgaactcctggggggaccggatgtcttcctcttccccccaaaacccaaggacaccctcatgatctcccggacccctgaggtcacatgcgtggtggtggacgtgagccacgaagaccctgaggtcaagttcaactggtacgtggacggcgtggaggtgcataatgccaagacaaagccgcgggaggagcagtacaacagcacgtaccgtgtggtcagcgtcctcaccgtcctgcaccaggactggctgaatggcaaggagtacaagtgcaaggtctccaacaaagccctcccagcccccactgagaaaaccatctccaaagccaaagggcagccccgagaaccacaggtgtacaccctgcccccatcccgggatgagctgaccaagaaccaggtcagcctgacctgcctggtcaaaggcttctatcccagcgacatcgccgtggagtgggagagcaatgggcagccggagaacaactacaagaccacgcctcccgtgctggactccgacggctccttcttcctctacagcaagctcaccgtggacaagagcaggtggcagcaggggaacgtcttctcatgctccgtgatgcatgaggctctgcacaaccactacacgcagaagagcctctccctgtctccgggtaaatga

SEQ ID NO: 148 - protein, 330 aa, Artificial Sequence
  Description of the artificial sequence: amino acid sequence of IgG1_S239D/I332T CH
ASTKGPSVFPLAPSSKSTSGGTAALGCLVKDYFPEPVTVSWNSGALTSGVHTFPAVLQSSGLYSLSSVVTVPSSSLGTQTYICNVNHKPSNTKVDKKVEPKSCDKTHTCPPCPAPELLGGPDVFLFPPKPKDTLMISRTPEVTCVVVDVSHEDPEVKFNWYVDGVEVHNAKTKPREEQYNSTYRVVSVLTVLHQDWLNGKEYKCKVSNKALPAPTEKTISKAKGQPREPQVYTLPPSRDELTKNQVSLTCLVKGFYPSDIAVEWESNGQPENNYKTTPPVLDSDGSFFLYSKLTVDKSRWQQGNVFSCSVMHEALHNHYTQKSLSLSPGK

SEQ ID NO: 149 - DNA, 993 bp, Artificial Sequence
  Description of the artificial sequence: base sequence of IgG1_S239D/I332L CH
gctagcaccaagggcccatcggtcttccccctggcaccctcctccaagagcacctctgggggcacagcggccctgggctgcctggtcaaggactacttccccgaaccggtgacggtgtcgtggaactcaggcgccctgaccagcggcgtgcacaccttcccggctgtcctacagtcctcaggactctactccctcagcagcgtggtgaccgtgccctccagcagcttgggcacccagacctacatctgcaacgtgaatcacaagcccagcaacaccaaggtggacaagaaagttgagcccaaatcttgtgacaaaactcacacatgcccaccgtgcccagcacctgaactcctggggggaccggatgtcttcctcttccccccaaaacccaaggacaccctcatgatctcccggacccctgaggtcacatgcgtggtggtggacgtgagccacgaagaccctgaggtcaagttcaactggtacgtggacggcgtggaggtgcataatgccaagacaaagccgcgggaggagcagtacaacagcacgtaccgtgtggtcagcgtcctcaccgtcctgcaccaggactggctgaatggcaaggagtacaagtgcaaggtctccaacaaagccctcccagcccccttagagaaaaccatctccaaagccaaagggcagccccgagaaccacaggtgtacaccctgcccccatcccgggatgagctgaccaagaaccaggtcagcctgacctgcctggtcaaaggcttctatcccagcgacatcgccgtggagtgggagagcaatgggcagccggagaacaactacaagaccacgcctcccgtgctggactccgacggctccttcttcctctacagcaagctcaccgtggacaagagcaggtggcagcaggggaacgtcttctcatgctccgtgatgcatgaggctctgcacaaccactacacgcagaagagcctctccctgtctccgggtaaatga

SEQ ID NO: 150 - protein, 330 aa, Artificial Sequence
  Description of the artificial sequence: amino acid sequence of IgG1_S239D/I332L CH
ASTKGPSVFPLAPSSKSTSGGTAALGCLVKDYFPEPVTVSWNSGALTSGVHTFPAVLQSSGLYSLSSVVTVPSSSLGTQTYICNVNHKPSNTKVDKKVEPKSCDKTHTCPPCPAPELLGGPDVFLFPPKPKDTLMISRTPEVTCVVVDVSHEDPEVKFNWYVDGVEVHNAKTKPREEQYNSTYRVVSVLTVLHQDWLNGKEYKCKVSNKALPAPLEKTISKAKGQPREPQVYTLPPSRDELTKNQVSLTCLVKGFYPSDIAVEWESNGQPENNYKTTPPVLDSDGSFFLYSKLTVDKSRWQQGNVFSCSVMHEALHNHYTQKSLSLSPGK

SEQ ID NO: 151 - DNA, 993 bp, Artificial Sequence
  Description of the artificial sequence: base sequence of IgG1_S239D/I332A CH
gctagcaccaagggcccatcggtcttccccctggcaccctcctccaagagcacctctgggggcacagcggccctgggctgcctggtcaaggactacttccccgaaccggtgacggtgtcgtggaactcaggcgccctgaccagcggcgtgcacaccttcccggctgtcctacagtcctcaggactctactccctcagcagcgtggtgaccgtgccctccagcagcttgggcacccagacctacatctgcaacgtgaatcacaagcccagcaacaccaaggtggacaagaaagttgagcccaaatcttgtgacaaaactcacacatgcccaccgtgcccagcacctgaactcctggggggaccggatgtcttcctcttccccccaaaacccaaggacaccctcatgatctcccggacccctgaggtcacatgcgtggtggtggacgtgagccacgaagaccctgaggtcaagttcaactggtacgtggacggcgtggaggtgcataatgccaagacaaagccgcgggaggagcagtacaacagcacgtaccgtgtggtcagcgtcctcaccgtcctgcaccaggactggctgaatggcaaggagtacaagtgcaaggtctccaacaaagccctcccagcccccgcagagaaaaccatctccaaagccaaagggcagccccgagaaccacaggtgtacaccctgcccccatcccgggatgagctgaccaagaaccaggtcagcctgacctgcctggtcaaaggcttctatcccagcgacatcgccgtggagtgggagagcaatgggcagccggagaacaactacaagaccacgcctcccgtgctggactccgacggctccttcttcctctacagcaagctcaccgtggacaagagcaggtggcagcaggggaacgtcttctcatgctccgtgatgcatgaggctctgcacaaccactacacgcagaagagcctctccctgtctccgggtaaatga

SEQ ID NO: 152 - protein, 330 aa, Artificial Sequence
  Description of the artificial sequence: amino acid sequence of IgG1_S239D/I332A CH
ASTKGPSVFPLAPSSKSTSGGTAALGCLVKDYFPEPVTVSWNSGALTSGVHTFPAVLQSSGLYSLSSVVTVPSSSLGTQTYICNVNHKPSNTKVDKKVEPKSCDKTHTCPPCPAPELLGGPDVFLFPPKPKDTLMISRTPEVTCVVVDVSHEDPEVKFNWYVDGVEVHNAKTKPREEQYNSTYRVVSVLTVLHQDWLNGKEYKCKVSNKALPAPAEKTISKAKGQPREPQVYTLPPSRDELTKNQVSLTCLVKGFYPSDIAVEWESNGQPENNYKTTPPVLDSDGSFFLYSKLTVDKSRWQQGNVFSCSVMHEALHNHYTQKSLSLSPGK

SEQ ID NO: 153 - DNA, 993 bp, Artificial Sequence
  Description of the artificial sequence: base sequence of IgG1_S239D/I332Y CH
gctagcaccaagggcccatcggtcttccccctggcaccctcctccaagagcacctctgggggcacagcggccctgggctgcctggtcaaggactacttccccgaaccggtgacggtgtcgtggaactcaggcgccctgaccagcggcgtgcacaccttcccggctgtcctacagtcctcaggactctactccctcagcagcgtggtgaccgtgccctccagcagcttgggcacccagacctacatctgcaacgtgaatcacaagcccagcaacaccaaggtggacaagaaagttgagcccaaatcttgtgacaaaactcacacatgcccaccgtgcccagcacctgaactcctggggggaccggatgtcttcctcttccccccaaaacccaaggacaccctcatgatctcccggacccctgaggtcacatgcgtggtggtggacgtgagccacgaagaccctgaggtcaagttcaactggtacgtggacggcgtggaggtgcataatgccaagacaaagccgcgggaggagcagtacaacagcacgtaccgtgtggtcagcgtcctcaccgtcctgcaccaggactggctgaatggcaaggagtacaagtgcaaggtctccaacaaagccctcccagccccctacgagaaaaccatctccaaagccaaagggcagccccgagaaccacaggtgtacaccctgcccccatcccgggatgagctgaccaagaaccaggtcagcctgacctgcctggtcaaaggcttctatcccagcgacatcgccgtggagtgggagagcaatgggcagccggagaacaactacaagaccacgcctcccgtgctggactccgacggctccttcttcctctacagcaagctcaccgtggacaagagcaggtggcagcaggggaacgtcttctcatgctccgtgatgcatgaggctctgcacaaccactacacgcagaagagcctctccctgtctccgggtaaatga

SEQ ID NO: 154 - protein, 330 aa, Artificial Sequence
  Description of the artificial sequence: amino acid sequence of IgG1_S239D/I332Y CH
ASTKGPSVFPLAPSSKSTSGGTAALGCLVKDYFPEPVTVSWNSGALTSGVHTFPAVLQSSGLYSLSSVVTVPSSSLGTQTYICNVNHKPSNTKVDKKVEPKSCDKTHTCPPCPAPELLGGPDVFLFPPKPKDTLMISRTPEVTCVVVDVSHEDPEVKFNWYVDGVEVHNAKTKPREEQYNSTYRVVSVLTVLHQDWLNGKEYKCKVSNKALPAPYEKTISKAKGQPREPQVYTLPPSRDELTKNQVSLTCLVKGFYPSDIAVEWESNGQPENNYKTTPPVLDSDGSFFLYSKLTVDKSRWQQGNVFSCSVMHEALHNHYTQKSLSLSPGK

SEQ ID NO: 155 - DNA, 993 bp, Artificial Sequence
  Description of the artificial sequence: base sequence of IgG1_S239D/I332F CH
gctagcaccaagggcccatcggtcttccccctggcaccctcctccaagagcacctctgggggcacagcggccctgggctgcctggtcaaggactacttccccgaaccggtgacggtgtcgtggaactcaggcgccctgaccagcggcgtgcacaccttcccggctgtcctacagtcctcaggactctactccctcagcagcgtggtgaccgtgccctccagcagcttgggcacccagacctacatctgcaacgtgaatcacaagcccagcaacaccaaggtggacaagaaagttgagcccaaatcttgtgacaaaactcacacatgcccaccgtgcccagcacctgaactcctggggggaccggatgtcttcctcttccccccaaaacccaaggacaccctcatgatctcccggacccctgaggtcacatgcgtggtggtggacgtgagccacgaagaccctgaggtcaagttcaactggtacgtggacggcgtggaggtgcataatgccaagacaaagccgcgggaggagcagtacaacagcacgtaccgtgtggtcagcgtcctcaccgtcctgcaccaggactggctgaatggcaaggagtacaagtgcaaggtctccaacaaagccctcccagcccccttcgagaaaaccatctccaaagccaaagggcagccccgagaaccacaggtgtacaccctgcccccatcccgggatgagctgaccaagaaccaggtcagcctgacctgcctggtcaaaggcttctatcccagcgacatcgccgtggagtgggagagcaatgggcagccggagaacaactacaagaccacgcctcccgtgctggactccgacggctccttcttcctctacagcaagctcaccgtggacaagagcaggtggcagcaggggaacgtcttctcatgctccgtgatgcatgaggctctgcacaaccactacacgcagaagagcctctccctgtctccgggtaaatga

SEQ ID NO: 156 - protein, 330 aa, Artificial Sequence
  Description of the artificial sequence: amino acid sequence of IgG1_S239D/I332F CH
ASTKGPSVFPLAPSSKSTSGGTAALGCLVKDYFPEPVTVSWNSGALTSGVHTFPAVLQSSGLYSLSSVVTVPSSSLGTQTYICNVNHKPSNTKVDKKVEPKSCDKTHTCPPCPAPELLGGPDVFLFPPKPKDTLMISRTPEVTCVVVDVSHEDPEVKFNWYVDGVEVHNAKTKPREEQYNSTYRVVSVLTVLHQDWLNGKEYKCKVSNKALPAPFEKTISKAKGQPREPQVYTLPPSRDELTKNQVSLTCLVKGFYPSDIAVEWESNGQPENNYKTTPPVLDSDGSFFLYSKLTVDKSRWQQGNVFSCSVMHEALHNHYTQKSLSLSPGK

SEQ ID NO: 157 - DNA, 993 bp, Artificial Sequence
  Description of the artificial sequence: base sequence of IgG1_S239D/I332W CH
gctagcaccaagggcccatcggtcttccccctggcaccctcctccaagagcacctctgggggcacagcggccctgggctgcctggtcaaggactacttccccgaaccggtgacggtgtcgtggaactcaggcgccctgaccagcggcgtgcacaccttcccggctgtcctacagtcctcaggactctactccctcagcagcgtggtgaccgtgccctccagcagcttgggcacccagacctacatctgcaacgtgaatcacaagcccagcaacaccaaggtggacaagaaagttgagcccaaatcttgtgacaaaactcacacatgcccaccgtgcccagcacctgaactcctggggggaccggatgtcttcctcttccccccaaaacccaaggacaccctcatgatctcccggacccctgaggtcacatgcgtggtggtggacgtgagccacgaagaccctgaggtcaagttcaactggtacgtggacggcgtggaggtgcataatgccaagacaaagccgcgggaggagcagtacaacagcacgtaccgtgtggtcagcgtcctcaccgtcctgcaccaggactggctgaatggcaaggagtacaagtgcaaggtctccaacaaagccctcccagccccctgggagaaaaccatctccaaagccaaagggcagccccgagaaccacaggtgtacaccctgcccccatcccgggatgagctgaccaagaaccaggtcagcctgacctgcctggtcaaaggcttctatcccagcgacatcgccgtggagtgggagagcaatgggcagccggagaacaactacaagaccacgcctcccgtgctggactccgacggctccttcttcctctacagcaagctcaccgtggacaagagcaggtggcagcaggggaacgtcttctcatgctccgtgatgcatgaggctctgcacaaccactacacgcagaagagcctctccctgtctccgggtaaatga

SEQ ID NO: 158 - protein, 330 aa, Artificial Sequence
  Description of the artificial sequence: amino acid sequence of IgG1_S239D/I332W CH
ASTKGPSVFPLAPSSKSTSGGTAALGCLVKDYFPEPVTVSWNSGALTSGVHTFPAVLQSSGLYSLSSVVTVPSSSLGTQTYICNVNHKPSNTKVDKKVEPKSCDKTHTCPPCPAPELLGGPDVFLFPPKPKDTLMISRTPEVTCVVVDVSHEDPEVKFNWYVDGVEVHNAKTKPREEQYNSTYRVVSVLTVLHQDWLNGKEYKCKVSNKALPAPWEKTISKAKGQPREPQVYTLPPSRDELTKNQVSLTCLVKGFYPSDIAVEWESNGQPENNYKTTPPVLDSDGSFFLYSKLTVDKSRWQQGNVFSCSVMHEALHNHYTQKSLSLSPGK

SEQ ID NO: 159 - DNA, 993 bp, Artificial Sequence
  Description of the artificial sequence: base sequence of IgG1_S239D/I332H CH
gctagcaccaagggcccatcggtcttccccctggcaccctcctccaagagcacctctgggggcacagcggccctgggctgcctggtcaaggactacttccccgaaccggtgacggtgtcgtggaactcaggcgccctgaccagcggcgtgcacaccttcccggctgtcctacagtcctcaggactctactccctcagcagcgtggtgaccgtgccctccagcagcttgggcacccagacctacatctgcaacgtgaatcacaagcccagcaacaccaaggtggacaagaaagttgagcccaaatcttgtgacaaaactcacacatgcccaccgtgcccagcacctgaactcctggggggaccggatgtcttcctcttccccccaaaacccaaggacaccctcatgatctcccggacccctgaggtcacatgcgtggtggtggacgtgagccacgaagaccctgaggtcaagttcaactggtacgtggacggcgtggaggtgcataatgccaagacaaagccgcgggaggagcagtacaacagcacgtaccgtgtggtcagcgtcctcaccgtcctgcaccaggactggctgaatggcaaggagtacaagtgcaaggtctccaacaaagccctcccagccccccatgagaaaaccatctccaaagccaaagggcagccccgagaaccacaggtgtacaccctgcccccatcccgggatgagctgaccaagaaccaggtcagcctgacctgcctggtcaaaggcttctatcccagcgacatcgccgtggagtgggagagcaatgggcagccggagaacaactacaagaccacgcctcccgtgctggactccgacggctccttcttcctctacagcaagctcaccgtggacaagagcaggtggcagcaggggaacgtcttctcatgctccgtgatgcatgaggctctgcacaaccactacacgcagaagagcctctccctgtctccgggtaaatga

SEQ ID NO: 160 - protein, 330 aa, Artificial Sequence
  Description of the artificial sequence: amino acid sequence of IgG1_S239D/I332H CH
ASTKGPSVFPLAPSSKSTSGGTAALGCLVKDYFPEPVTVSWNSGALTSGVHTFPAVLQSSGLYSLSSVVTVPSSSLGTQTYICNVNHKPSNTKVDKKVEPKSCDKTHTCPPCPAPELLGGPDVFLFPPKPKDTLMISRTPEVTCVVVDVSHEDPEVKFNWYVDGVEVHNAKTKPREEQYNSTYRVVSVLTVLHQDWLNGKEYKCKVSNKALPAPHEKTISKAKGQPREPQVYTLPPSRDELTKNQVSLTCLVKGFYPSDIAVEWESNGQPENNYKTTPPVLDSDGSFFLYSKLTVDKSRWQQGNVFSCSVMHEALHNHYTQKSLSLSPGK

SEQ ID NO: 161 - DNA, 993 bp, Artificial Sequence
  Description of the artificial sequence: base sequence of IgG1_S239D/K326L CH
gctagcaccaagggcccatcggtcttccccctggcaccctcctccaagagcacctctgggggcacagcggccctgggctgcctggtcaaggactacttccccgaaccggtgacggtgtcgtggaactcaggcgccctgaccagcggcgtgcacaccttcccggctgtcctacagtcctcaggactctactccctcagcagcgtggtgaccgtgccctccagcagcttgggcacccagacctacatctgcaacgtgaatcacaagcccagcaacaccaaggtggacaagaaagttgagcccaaatcttgtgacaaaactcacacatgcccaccgtgcccagcacctgaactcctggggggaccggatgtcttcctcttccccccaaaacccaaggacaccctcatgatctcccggacccctgaggtcacatgcgtggtggtggacgtgagccacgaagaccctgaggtcaagttcaactggtacgtggacggcgtggaggtgcataatgccaagacaaagccgcgggaggagcagtacaacagcacgtaccgtgtggtcagcgtcctcaccgtcctgcaccaggactggctgaatggcaaggagtacaagtgcaaggtctccaacctagccctcccagcccccatcgagaaaaccatctccaaagccaaagggcagccccgagaaccacaggtgtacaccctgcccccatcccgggatgagctgaccaagaaccaggtcagcctgacctgcctggtcaaaggcttctatcccagcgacatcgccgtggagtgggagagcaatgggcagccggagaacaactacaagaccacgcctcccgtgctggactccgacggctccttcttcctctacagcaagctcaccgtggacaagagcaggtggcagcaggggaacgtcttctcatgctccgtgatgcatgaggctctgcacaaccactacacgcagaagagcctctccctgtctccgggtaaatga

SEQ ID NO: 162 - protein, 330 aa, Artificial Sequence
  Description of the artificial sequence: amino acid sequence of IgG1_S239D/K326L CH
ASTKGPSVFPLAPSSKSTSGGTAALGCLVKDYFPEPVTVSWNSGALTSGVHTFPAVLQSSGLYSLSSVVTVPSSSLGTQTYICNVNHKPSNTKVDKKVEPKSCDKTHTCPPCPAPELLGGPDVFLFPPKPKDTLMISRTPEVTCVVVDVSHEDPEVKFNWYVDGVEVHNAKTKPREEQYNSTYRVVSVLTVLHQDWLNGKEYKCKVSNLALPAPIEKTISKAKGQPREPQVYTLPPSRDELTKNQVSLTCLVKGFYPSDIAVEWESNGQPENNYKTTPPVLDSDGSFFLYSKLTVDKSRWQQGNVFSCSVMHEALHNHYTQKSLSLSPGK

SEQ ID NO: 163 - DNA, 993 bp, Artificial Sequence
  Description of the artificial sequence: base sequence of IgG1_S239D/K326E CH
gctagcaccaagggcccatcggtcttccccctggcaccctcctccaagagcacctctgggggcacagcggccctgggctgcctggtcaaggactacttccccgaaccggtgacggtgtcgtggaactcaggcgccctgaccagcggcgtgcacaccttcccggctgtcctacagtcctcaggactctactccctcagcagcgtggtgaccgtgccctccagcagcttgggcacccagacctacatctgcaacgtgaatcacaagcccagcaacaccaaggtggacaagaaagttgagcccaaatcttgtgacaaaactcacacatgcccaccgtgcccagcacctgaactcctggggggaccggatgtcttcctcttccccccaaaacccaaggacaccctcatgatctcccggacccctgaggtcacatgcgtggtggtggacgtgagccacgaagaccctgaggtcaagttcaactggtacgtggacggcgtggaggtgcataatgccaagacaaagccgcgggaggagcagtacaacagcacgtaccgtgtggtcagcgtcctcaccgtcctgcaccaggactggctgaatggcaaggagtacaagtgcaaggtctccaacgaagccctcccagcccccatcgagaaaaccatctccaaagccaaagggcagccccgagaaccacaggtgtacaccctgcccccatcccgggatgagctgaccaagaaccaggtcagcctgacctgcctggtcaaaggcttctatcccagcgacatcgccgtggagtgggagagcaatgggcagccggagaacaactacaagaccacgcctcccgtgctggactccgacggctccttcttcctctacagcaagctcaccgtggacaagagcaggtggcagcaggggaacgtcttctcatgctccgtgatgcatgaggctctgcacaaccactacacgcagaagagcctctccctgtctccgggtaaatga

SEQ ID NO: 164 - protein, 330 aa, Artificial Sequence
  Description of the artificial sequence: amino acid sequence of IgG1_S239D/K326E CH
ASTKGPSVFPLAPSSKSTSGGTAALGCLVKDYFPEPVTVSWNSGALTSGVHTFPAVLQSSGLYSLSSVVTVPSSSLGTQTYICNVNHKPSNTKVDKKVEPKSCDKTHTCPPCPAPELLGGPEVFLFPPKPKDTLMISRTPEVTCVVVDVSHEDPEVKFNWYVDGVEVHNAKTKPREEQYNSTYRVVSVLTVLHQDWLNGKEYKCKVSNEALPAPIEKTISKAKGQPREPQVYTLPPSRDELTKNQVSLTCLVKGFYPSDIAVEWESNGQPENNYKTTPPVLDSDGSFFLYSKLTVDKSRWQQGNVFSCSVMHEALHNHYTQKSLSLSPGK

SEQ ID NO: 165 - DNA, 993 bp, Artificial Sequence
  Description of the artificial sequence: base sequence of IgG1_S239D/K326I CH
gctagcaccaagggcccatcggtcttccccctggcaccctcctccaagagcacctctgggggcacagcggccctgggctgcctggtcaaggactacttccccgaaccggtgacggtgtcgtggaactcaggcgccctgaccagcggcgtgcacaccttcccggctgtcctacagtcctcaggactctactccctcagcagcgtggtgaccgtgccctccagcagcttgggcacccagacctacatctgcaacgtgaatcacaagcccagcaacaccaaggtggacaagaaagttgagcccaaatcttgtgacaaaactcacacatgcccaccgtgcccagcacctgaactcctggggggaccggatgtcttcctcttccccccaaaacccaaggacaccctcatgatctcccggacccctgaggtcacatgcgtggtggtggacgtgagccacgaagaccctgaggtcaagttcaactggtacgtggacggcgtggaggtgcataatgccaagacaaagccgcgggaggagcagtacaacagcacgtaccgtgtggtcagcgtcctcaccgtcctgcaccaggactggctgaatggcaaggagtacaagtgcaaggtctccaacatagccctcccagcccccatcgagaaaaccatctccaaagccaaagggcagccccgagaaccacaggtgtacaccctgcccccatcccgggatgagctgaccaagaaccaggtcagcctgacctgcctggtcaaaggcttctatcccagcgacatcgccgtggagtgggagagcaatgggcagccggagaacaactacaagaccacgcctcccgtgctggactccgacggctccttcttcctctacagcaagctcaccgtggacaagagcaggtggcagcaggggaacgtcttctcatgctccgtgatgcatgaggctctgcacaaccactacacgcagaagagcctctccctgtctccgggtaaatga

SEQ ID NO: 166 - protein, 330 aa, Artificial Sequence
  Description of the artificial sequence: amino acid sequence of IgG1_S239D/K326I CH
ASTKGPSVFPLAPSSKSTSGGTAALGCLVKDYFPEPVTVSWNSGALTSGVHTFPAVLQSSGLYSLSSVVTVPSSSLGTQTYICNVNHKPSNTKVDKKVEPKSCDKTHTCPPCPAPELLGGPEVFLFPPKPKDTLMISRTPEVTCVVVDVSHEDPEVKFNWYVDGVEVHNAKTKPREEQYNSTYRVVSVLTVLHQDWLNGKEYKCKVSNIALPAPIEKTISKAKGQPREPQVYTLPPSRDELTKNQVSLTCLVKGFYPSDIAVEWESNGQPENNYKTTPPVLDSDGSFFLYSKLTVDKSRWQQGNVFSCSVMHEALHNHYTQKSLSLSPGK

SEQ ID NO: 167 - DNA, 993 bp, Artificial Sequence
  Description of the artificial sequence: base sequence of IgG1_S239E/I332Y CH
gctagcaccaagggcccatcggtcttccccctggcaccctcctccaagagcacctctgggggcacagcggccctgggctgcctggtcaaggactacttccccgaaccggtgacggtgtcgtggaactcaggcgccctgaccagcggcgtgcacaccttcccggctgtcctacagtcctcaggactctactccctcagcagcgtggtgaccgtgccctccagcagcttgggcacccagacctacatctgcaacgtgaatcacaagcccagcaacaccaaggtggacaagaaagttgagcccaaatcttgtgacaaaactcacacatgcccaccgtgcccagcacctgaactcctggggggaccggaagtcttcctcttccccccaaaacccaaggacaccctcatgatctcccggacccctgaggtcacatgcgtggtggtggacgtgagccacgaagaccctgaggtcaagttcaactggtacgtggacggcgtggaggtgcataatgccaagacaaagccgcgggaggagcagtacaacagcacgtaccgtgtggtcagcgtcctcaccgtcctgcaccaggactggctgaatggcaaggagtacaagtgcaaggtctccaacaaagccctcccagccccctacgagaaaaccatctccaaagccaaagggcagccccgagaaccacaggtgtacaccctgcccccatcccgggatgagctgaccaagaaccaggtcagcctgacctgcctggtcaaaggcttctatcccagcgacatcgccgtggagtgggagagcaatgggcagccggagaacaactacaagaccacgcctcccgtgctggactccgacggctccttcttcctctacagcaagctcaccgtggacaagagcaggtggcagcaggggaacgtcttctcatgctccgtgatgcatgaggctctgcacaaccactacacgcagaagagcctctccctgtctccgggtaaatga

SEQ ID NO: 168 - protein, 330 aa, Artificial Sequence
  Description of the artificial sequence: amino acid sequence of IgG1_S239E/I332Y CH
ASTKGPSVFPLAPSSKSTSGGTAALGCLVKDYFPEPVTVSWNSGALTSGVHTFPAVLQSSGLYSLSSVVTVPSSSLGTQTYICNVNHKPSNTKVDKKVEPKSCDKTHTCPPCPAPELLGGPEVFLFPPKPKDTLMISRTPEVTCVVVDVSHEDPEVKFNWYVDGVEVHNAKTKPREEQYNSTYRVVSVLTVLHQDWLNGKEYKCKVSNKALPAPYEKTISKAKGQPREPQVYTLPPSRDELTKNQVSLTCLVKGFYPSDIAVEWESNGQPENNYKTTPPVLDSDGSFFLYSKLTVDKSRWQQGNVFSCSVMHEALHNHYTQKSLSLSPGK

SEQ ID NO: 169 - DNA, 993 bp, Artificial Sequence
  Description of the artificial sequence: base sequence of IgG1_S239E/I332F CH
gctagcaccaagggcccatcggtcttccccctggcaccctcctccaagagcacctctgggggcacagcggccctgggctgcctggtcaaggactacttccccgaaccggtgacggtgtcgtggaactcaggcgccctgaccagcggcgtgcacaccttcccggctgtcctacagtcctcaggactctactccctcagcagcgtggtgaccgtgccctccagcagcttgggcacccagacctacatctgcaacgtgaatcacaagcccagcaacaccaaggtggacaagaaagttgagcccaaatcttgtgacaaaactcacacatgcccaccgtgcccagcacctgaactcctggggggaccggaagtcttcctcttccccccaaaacccaaggacaccctcatgatctcccggacccctgaggtcacatgcgtggtggtggacgtgagccacgaagaccctgaggtcaagttcaactggtacgtggacggcgtggaggtgcataatgccaagacaaagccgcgggaggagcagtacaacagcacgtaccgtgtggtcagcgtcctcaccgtcctgcaccaggactggctgaatggcaaggagtacaagtgcaaggtctccaacaaagccctcccagcccccttcgagaaaaccatctccaaagccaaagggcagccccgagaaccacaggtgtacaccctgcccccatcccgggatgagctgaccaagaaccaggtcagcctgacctgcctggtcaaaggcttctatcccagcgacatcgccgtggagtgggagagcaatgggcagccggagaacaactacaagaccacgcctcccgtgctggactccgacggctccttcttcctctacagcaagctcaccgtggacaagagcaggtggcagcaggggaacgtcttctcatgctccgtgatgcatgaggctctgcacaaccactacacgcagaagagcctctccctgtctccgggtaaatga

SEQ ID NO: 170 - protein, 330 aa, Artificial Sequence
  Description of the artificial sequence: amino acid sequence of IgG1_S239E/I332F CH
ASTKGPSVFPLAPSSKSTSGGTAALGCLVKDYFPEPVTVSWNSGALTSGVHTFPAVLQSSGLYSLSSVVTVPSSSLGTQTYICNVNHKPSNTKVDKKVEPKSCDKTHTCPPCPAPELLGGPEVFLFPPKPKDTLMISRTPEVTCVVVDVSHEDPEVKFNWYVDGVEVHNAKTKPREEQYNSTYRVVSVLTVLHQDWLNGKEYKCKVSNKALPAPFEKTISKAKGQPREPQVYTLPPSRDELTKNQVSLTCLVKGFYPSDIAVEWESNGQPENNYKTTPPVLDSDGSFFLYSKLTVDKSRWQQGNVFSCSVMHEALHNHYTQKSLSLSPGK

SEQ ID NO: 171 - DNA, 993 bp, Artificial Sequence
  Description of the artificial sequence: base sequence of IgG1_S239E/I332W CH
gctagcaccaagggcccatcggtcttccccctggcaccctcctccaagagcacctctgggggcacagcggccctgggctgcctggtcaaggactacttccccgaaccggtgacggtgtcgtggaactcaggcgccctgaccagcggcgtgcacaccttcccggctgtcctacagtcctcaggactctactccctcagcagcgtggtgaccgtgccctccagcagcttgggcacccagacctacatctgcaacgtgaatcacaagcccagcaacaccaaggtggacaagaaagttgagcccaaatcttgtgacaaaactcacacatgcccaccgtgcccagcacctgaactcctggggggaccggaagtcttcctcttccccccaaaacccaaggacaccctcatgatctcccggacccctgaggtcacatgcgtggtggtggacgtgagccacgaagaccctgaggtcaagttcaactggtacgtggacggcgtggaggtgcataatgccaagacaaagccgcgggaggagcagtacaacagcacgtaccgtgtggtcagcgtcctcaccgtcctgcaccaggactggctgaatggcaaggagtacaagtgcaaggtctccaacaaagccctcccagccccctgggagaaaaccatctccaaagccaaagggcagccccgagaaccacaggtgtacaccctgcccccatcccgggatgagctgaccaagaaccaggtcagcctgacctgcctggtcaaaggcttctatcccagcgacatcgccgtggagtgggagagcaatgggcagccggagaacaactacaagaccacgcctcccgtgctggactccgacggctccttcttcctctacagcaagctcaccgtggacaagagcaggtggcagcaggggaacgtcttctcatgctccgtgatgcatgaggctctgcacaaccactacacgcagaagagcctctccctgtctccgggtaaatga

SEQ ID NO: 172 - protein, 330 aa, Artificial Sequence
  Description of the artificial sequence: amino acid sequence of IgG1_S239E/I332W CH
ASTKGPSVFPLAPSSKSTSGGTAALGCLVKDYFPEPVTVSWNSGALTSGVHTFPAVLQSSGLYSLSSVVTVPSSSLGTQTYICNVNHKPSNTKVDKKVEPKSCDKTHTCPPCPAPELLGGPEVFLFPPKPKDTLMISRTPEVTCVVVDVSHEDPEVKFNWYVDGVEVHNAKTKPREEQYNSTYRVVSVLTVLHQDWLNGKEYKCKVSNKALPAPWEKTISKAKGQPREPQVYTLPPSRDELTKNQVSLTCLVKGFYPSDIAVEWESNGQPENNYKTTPPVLDSDGSFFLYSKLTVDKSRWQQGNVFSCSVMHEALHNHYTQKSLSLSPGK

SEQ ID NO: 173 - DNA, 993 bp, Artificial Sequence
  Description of the artificial sequence: base sequence of IgG1_S239E/I332H CH
gctagcaccaagggcccatcggtcttccccctggcaccctcctccaagagcacctctgggggcacagcggccctgggctgcctggtcaaggactacttccccgaaccggtgacggtgtcgtggaactcaggcgccctgaccagcggcgtgcacaccttcccggctgtcctacagtcctcaggactctactccctcagcagcgtggtgaccgtgccctccagcagcttgggcacccagacctacatctgcaacgtgaatcacaagcccagcaacaccaaggtggacaagaaagttgagcccaaatcttgtgacaaaactcacacatgcccaccgtgcccagcacctgaactcctggggggaccggaagtcttcctcttccccccaaaacccaaggacaccctcatgatctcccggacccctgaggtcacatgcgtggtggtggacgtgagccacgaagaccctgaggtcaagttcaactggtacgtggacggcgtggaggtgcataatgccaagacaaagccgcgggaggagcagtacaacagcacgtaccgtgtggtcagcgtcctcaccgtcctgcaccaggactggctgaatggcaaggagtacaagtgcaaggtctccaacaaagccctcccagccccccatgagaaaaccatctccaaagccaaagggcagccccgagaaccacaggtgtacaccctgcccccatcccgggatgagctgaccaagaaccaggtcagcctgacctgcctggtcaaaggcttctatcccagcgacatcgccgtggagtgggagagcaatgggcagccggagaacaactacaagaccacgcctcccgtgctggactccgacggctccttcttcctctacagcaagctcaccgtggacaagagcaggtggcagcaggggaacgtcttctcatgctccgtgatgcatgaggctctgcacaaccactacacgcagaagagcctctccctgtctccgggtaaatga

SEQ ID NO: 174 - protein, 330 aa, Artificial Sequence
  Description of the artificial sequence: amino acid sequence of IgG1_S239E/I332H CH
ASTKGPSVFPLAPSSKSTSGGTAALGCLVKDYFPEPVTVSWNSGALTSGVHTFPAVLQSSGLYSLSSVVTVPSSSLGTQTYICNVNHKPSNTKVDKKVEPKSCDKTHTCPPCPAPELLGGPEVFLFPPKPKDTLMISRTPEVTCVVVDVSHEDPEVKFNWYVDGVEVHNAKTKPREEQYNSTYRVVSVLTVLHQDWLNGKEYKCKVSNKALPAPHEKTISKAKGQPREPQVYTLPPSRDELTKNQVSLTCLVKGFYPSDIAVEWESNGQPENNYKTTPPVLDSDGSFFLYSKLTVDKSRWQQGNVFSCSVMHEALHNHYTQKSLSLSPGK

SEQ ID NO: 175 - DNA, 993 bp, Artificial Sequence
  Description of the artificial sequence: base sequence of IgG1_S239E/I332E CH
gctagcaccaagggcccatcggtcttccccctggcaccctcctccaagagcacctctgggggcacagcggccctgggctgcctggtcaaggactacttccccgaaccggtgacggtgtcgtggaactcaggcgccctgaccagcggcgtgcacaccttcccggctgtcctacagtcctcaggactctactccctcagcagcgtggtgaccgtgccctccagcagcttgggcacccagacctacatctgcaacgtgaatcacaagcccagcaacaccaaggtggacaagaaagttgagcccaaatcttgtgacaaaactcacacatgcccaccgtgcccagcacctgaactcctggggggaccggaagtcttcctcttccccccaaaacccaaggacaccctcatgatctcccggacccctgaggtcacatgcgtggtggtggacgtgagccacgaagaccctgaggtcaagttcaactggtacgtggacggcgtggaggtgcataatgccaagacaaagccgcgggaggagcagtacaacagcacgtaccgtgtggtcagcgtcctcaccgtcctgcaccaggactggctgaatggcaaggagtacaagtgcaaggtctccaacaaagccctcccagcccccgaagagaaaaccatctccaaagccaaagggcagccccgagaaccacaggtgtacaccctgcccccatcccgggatgagctgaccaagaaccaggtcagcctgacctgcctggtcaaaggcttctatcccagcgacatcgccgtggagtgggagagcaatgggcagccggagaacaactacaagaccacgcctcccgtgctggactccgacggctccttcttcctctacagcaagctcaccgtggacaagagcaggtggcagcaggggaacgtcttctcatgctccgtgatgcatgaggctctgcacaaccactacacgcagaagagcctctccctgtctccgggtaaatga

SEQ ID NO: 176 - protein, 330 aa, Artificial Sequence
  Description of the artificial sequence: amino acid sequence of IgG1_S239E/I332E CH
ASTKGPSVFPLAPSSKSTSGGTAALGCLVKDYFPEPVTVSWNSGALTSGVHTFPAVLQSSGLYSLSSVVTVPSSSLGTQTYICNVNHKPSNTKVDKKVEPKSCDKTHTCPPCPAPELLGGPEVFLFPPKPKDTLMISRTPEVTCVVVDVSHEDPEVKFNWYVDGVEVHNAKTKPREEQYNSTYRVVSVLTVLHQDWLNGKEYKCKVSNKALPAPEEKTISKAKGQPREPQVYTLPPSRDELTKNQVSLTCLVKGFYPSDIAVEWESNGQPENNYKTTPPVLDSDGSFFLYSKLTVDKSRWQQGNVFSCSVMHEALHNHYTQKSLSLSPGK

SEQ ID NO: 177 - DNA, 993 bp, Artificial Sequence
  Description of the artificial sequence: base sequence of IgG1_S239E/I332D CH
gctagcaccaagggcccatcggtcttccccctggcaccctcctccaagagcacctctgggggcacagcggccctgggctgcctggtcaaggactacttccccgaaccggtgacggtgtcgtggaactcaggcgccctgaccagcggcgtgcacaccttcccggctgtcctacagtcctcaggactctactccctcagcagcgtggtgaccgtgccctccagcagcttgggcacccagacctacatctgcaacgtgaatcacaagcccagcaacaccaaggtggacaagaaagttgagcccaaatcttgtgacaaaactcacacatgcccaccgtgcccagcacctgaactcctggggggaccggaagtcttcctcttccccccaaaacccaaggacaccctcatgatctcccggacccctgaggtcacatgcgtggtggtggacgtgagccacgaagaccctgaggtcaagttcaactggtacgtggacggcgtggaggtgcataatgccaagacaaagccgcgggaggagcagtacaacagcacgtaccgtgtggtcagcgtcctcaccgtcctgcaccaggactggctgaatggcaaggagtacaagtgcaaggtctccaacaaagccctcccagcccccgatgagaaaaccatctccaaagccaaagggcagccccgagaaccacaggtgtacaccctgcccccatcccgggatgagctgaccaagaaccaggtcagcctgacctgcctggtcaaaggcttctatcccagcgacatcgccgtggagtgggagagcaatgggcagccggagaacaactacaagaccacgcctcccgtgctggactccgacggctccttcttcctctacagcaagctcaccgtggacaagagcaggtggcagcaggggaacgtcttctcatgctccgtgatgcatgaggctctgcacaaccactacacgcagaagagcctctccctgtctccgggtaaatga

SEQ ID NO: 178 - protein, 330 aa, Artificial Sequence
  Description of the artificial sequence: amino acid sequence of IgG1_S239E/I332D CH
ASTKGPSVFPLAPSSKSTSGGTAALGCLVKDYFPEPVTVSWNSGALTSGVHTFPAVLQSSGLYSLSSVVTVPSSSLGTQTYICNVNHKPSNTKVDKKVEPKSCDKTHTCPPCPAPELLGGPEVFLFPPKPKDTLMISRTPEVTCVVVDVSHEDPEVKFNWYVDGVEVHNAKTKPREEQYNSTYRVVSVLTVLHQDWLNGKEYKCKVSNKALPAPDEKTISKAKGQPREPQVYTLPPSRDELTKNQVSLTCLVKGFYPSDIAVEWESNGQPENNYKTTPPVLDSDGSFFLYSKLTVDKSRWQQGNVFSCSVMHEALHNHYTQKSLSLSPGK

SEQ ID NO: 179 - DNA, 993 bp, Artificial Sequence
  Description of the artificial sequence: base sequence of IgG1_S239E/I332T CH
gctagcaccaagggcccatcggtcttccccctggcaccctcctccaagagcacctctgggggcacagcggccctgggctgcctggtcaaggactacttccccgaaccggtgacggtgtcgtggaactcaggcgccctgaccagcggcgtgcacaccttcccggctgtcctacagtcctcaggactctactccctcagcagcgtggtgaccgtgccctccagcagcttgggcacccagacctacatctgcaacgtgaatcacaagcccagcaacaccaaggtggacaagaaagttgagcccaaatcttgtgacaaaactcacacatgcccaccgtgcccagcacctgaactcctggggggaccggaagtcttcctcttccccccaaaacccaaggacaccctcatgatctcccggacccctgaggtcacatgcgtggtggtggacgtgagccacgaagaccctgaggtcaagttcaactggtacgtggacggcgtggaggtgcataatgccaagacaaagccgcgggaggagcagtacaacagcacgtaccgtgtggtcagcgtcctcaccgtcctgcaccaggactggctgaatggcaaggagtacaagtgcaaggtctccaacaaagccctcccagcccccactgagaaaaccatctccaaagccaaagggcagccccgagaaccacaggtgtacaccctgcccccatcccgggatgagctgaccaagaaccaggtcagcctgacctgcctggtcaaaggcttctatcccagcgacatcgccgtggagtgggagagcaatgggcagccggagaacaactacaagaccacgcctcccgtgctggactccgacggctccttcttcctctacagcaagctcaccgtggacaagagcaggtggcagcaggggaacgtcttctcatgctccgtgatgcatgaggctctgcacaaccactacacgcagaagagcctctccctgtctccgggtaaatga

SEQ ID NO: 180 - protein, 330 aa, Artificial Sequence
  Description of the artificial sequence: amino acid sequence of IgG1_S239E/I332T CH
ASTKGPSVFPLAPSSKSTSGGTAALGCLVKDYFPEPVTVSWNSGALTSGVHTFPAVLQSSGLYSLSSVVTVPSSSLGTQTYICNVNHKPSNTKVDKKVEPKSCDKTHTCPPCPAPELLGGPEVFLFPPKPKDTLMISRTPEVTCVVVDVSHEDPEVKFNWYVDGVEVHNAKTKPREEQYNSTYRVVSVLTVLHQDWLNGKEYKCKVSNKALPAPTEKTISKAKGQPREPQVYTLPPSRDELTKNQVSLTCLVKGFYPSDIAVEWESNGQPENNYKTTPPVLDSDGSFFLYSKLTVDKSRWQQGNVFSCSVMHEALHNHYTQKSLSLSPGK

SEQ ID NO: 181 - DNA, 993 bp, Artificial Sequence
  Description of the artificial sequence: base sequence of IgG1_S239E/I332L CH
gctagcaccaagggcccatcggtcttccccctggcaccctcctccaagagcacctctgggggcacagcggccctgggctgcctggtcaaggactacttccccgaaccggtgacggtgtcgtggaactcaggcgccctgaccagcggcgtgcacaccttcccggctgtcctacagtcctcaggactctactccctcagcagcgtggtgaccgtgccctccagcagcttgggcacccagacctacatctgcaacgtgaatcacaagcccagcaacaccaaggtggacaagaaagttgagcccaaatcttgtgacaaaactcacacatgcccaccgtgcccagcacctgaactcctggggggaccggaagtcttcctcttccccccaaaacccaaggacaccctcatgatctcccggacccctgaggtcacatgcgtggtggtggacgtgagccacgaagaccctgaggtcaagttcaactggtacgtggacggcgtggaggtgcataatgccaagacaaagccgcgggaggagcagtacaacagcacgtaccgtgtggtcagcgtcctcaccgtcctgcaccaggactggctgaatggcaaggagtacaagtgcaaggtctccaacaaagccctcccagcccccttagagaaaaccatctccaaagccaaagggcagccccgagaaccacaggtgtacaccctgcccccatcccgggatgagctgaccaagaaccaggtcagcctgacctgcctggtcaaaggcttctatcccagcgacatcgccgtggagtgggagagcaatgggcagccggagaacaactacaagaccacgcctcccgtgctggactccgacggctccttcttcctctacagcaagctcaccgtggacaagagcaggtggcagcaggggaacgtcttctcatgctccgtgatgcatgaggctctgcacaaccactacacgcagaagagcctctccctgtctccgggtaaatga

SEQ ID NO: 182 - protein, 330 aa, Artificial Sequence
  Description of the artificial sequence: amino acid sequence of IgG1_S239E/I332L CH
ASTKGPSVFPLAPSSKSTSGGTAALGCLVKDYFPEPVTVSWNSGALTSGVHTFPAVLQSSGLYSLSSVVTVPSSSLGTQTYICNVNHKPSNTKVDKKVEPKSCDKTHTCPPCPAPELLGGPEVFLFPPKPKDTLMISRTPEVTCVVVDVSHEDPEVKFNWYVDGVEVHNAKTKPREEQYNSTYRVVSVLTVLHQDWLNGKEYKCKVSNKALPAPLEKTISKAKGQPREPQVYTLPPSRDELTKNQVSLTCLVKGFYPSDIAVEWESNGQPENNYKTTPPVLDSDGSFFLYSKLTVDKSRWQQGNVFSCSVMHEALHNHYTQKSLSLSPGK

SEQ ID NO: 183 - DNA, 993 bp, Artificial Sequence
  Description of the artificial sequence: base sequence of IgG1_S239E/I332A CH
gctagcaccaagggcccatcggtcttccccctggcaccctcctccaagagcacctctgggggcacagcggccctgggctgcctggtcaaggactacttccccgaaccggtgacggtgtcgtggaactcaggcgccctgaccagcggcgtgcacaccttcccggctgtcctacagtcctcaggactctactccctcagcagcgtggtgaccgtgccctccagcagcttgggcacccagacctacatctgcaacgtgaatcacaagcccagcaacaccaaggtggacaagaaagttgagcccaaatcttgtgacaaaactcacacatgcccaccgtgcccagcacctgaactcctggggggaccggaagtcttcctcttccccccaaaacccaaggacaccctcatgatctcccggacccctgaggtcacatgcgtggtggtggacgtgagccacgaagaccctgaggtcaagttcaactggtacgtggacggcgtggaggtgcataatgccaagacaaagccgcgggaggagcagtacaacagcacgtaccgtgtggtcagcgtcctcaccgtcctgcaccaggactggctgaatggcaaggagtacaagtgcaaggtctccaacaaagccctcccagcccccgcagagaaaaccatctccaaagccaaagggcagccccgagaaccacaggtgtacaccctgcccccatcccgggatgagctgaccaagaaccaggtcagcctgacctgcctggtcaaaggcttctatcccagcgacatcgccgtggagtgggagagcaatgggcagccggagaacaactacaagaccacgcctcccgtgctggactccgacggctccttcttcctctacagcaagctcaccgtggacaagagcaggtggcagcaggggaacgtcttctcatgctccgtgatgcatgaggctctgcacaaccactacacgcagaagagcctctccctgtctccgggtaaatga

SEQ ID NO: 184 - protein, 330 aa, Artificial Sequence
  Description of the artificial sequence: amino acid sequence of IgG1_S239E/I332A CH
ASTKGPSVFPLAPSSKSTSGGTAALGCLVKDYFPEPVTVSWNSGALTSGVHTFPAVLQSSGLYSLSSVVTVPSSSLGTQTYICNVNHKPSNTKVDKKVEPKSCDKTHTCPPCPAPELLGGPEVFLFPPKPKDTLMISRTPEVTCVVVDVSHEDPEVKFNWYVDGVEVHNAKTKPREEQYNSTYRVVSVLTVLHQDWLNGKEYKCKVSNKALPAPAEKTISKAKGQPREPQVYTLPPSRDELTKNQVSLTCLVKGFYPSDIAVEWESNGQPENNYKTTPPVLDSDGSFFLYSKLTVDKSRWQQGNVFSCSVMHEALHNHYTQKSLSLSPGK

SEQ ID NO: 185 - DNA, 993 bp, Artificial Sequence; identical to SEQ ID NO: 89
  Description of the artificial sequence: base sequence of IgG1_S239D/K326T CH

SEQ ID NO: 186 - protein, 330 aa, Artificial Sequence
  Description of the artificial sequence: amino acid sequence of IgG1_S239D/K326T CH
ASTKGPSVFPLAPSSKSTSGGTAALGCLVKDYFPEPVTVSWNSGALTSGVHTFPAVLQSSGLYSLSSVVTVPSSSLGTQTYICNVNHKPSNTKVDKKVEPKSCDKTHTCPPCPAPELLGGPEVFLFPPKPKDTLMISRTPEVTCVVVDVSHEDPEVKFNWYVDGVEVHNAKTKPREEQYNSTYRVVSVLTVLHQDWLNGKEYKCKVSNTALPAPIEKTISKAKGQPREPQVYTLPPSRDELTKNQVSLTCLVKGFYPSDIAVEWESNGQPENNYKTTPPVLDSDGSFFLYSKLTVDKSRWQQGNVFSCSVMHEALHNHYTQKSLSLSPGK

SEQ ID NO: 187 - DNA, 993 bp, Artificial Sequence; identical to SEQ ID NO: 161
  Description of the artificial sequence: base sequence of IgG1_S239D/K326L CH

SEQ ID NO: 188 - protein, 330 aa, Artificial Sequence
  Description of the artificial sequence: amino acid sequence of IgG1_S239D/K326L CH
ASTKGPSVFPLAPSSKSTSGGTAALGCLVKDYFPEPVTVSWNSGALTSGVHTFPAVLQSSGLYSLSSVVTVPSSSLGTQTYICNVNHKPSNTKVDKKVEPKSCDKTHTCPPCPAPELLGGPEVFLFPPKPKDTLMISRTPEVTCVVVDVSHEDPEVKFNWYVDGVEVHNAKTKPREEQYNSTYRVVSVLTVLHQDWLNGKEYKCKVSNLALPAPIEKTISKAKGQPREPQVYTLPPSRDELTKNQVSLTCLVKGFYPSDIAVEWESNGQPENNYKTTPPVLDSDGSFFLYSKLTVDKSRWQQGNVFSCSVMHEALHNHYTQKSLSLSPGK

SEQ ID NO: 189 - DNA, 993 bp, Artificial Sequence
  Description of the artificial sequence: base sequence of IgG1_S239E/K326E CH
gctagcaccaagggcccatcggtcttccccctggcaccctcctccaagagcacctctgggggcacagcggccctgggctgcctggtcaaggactacttccccgaaccggtgacggtgtcgtggaactcaggcgccctgaccagcggcgtgcacaccttcccggctgtcctacagtcctcaggactctactccctcagcagcgtggtgaccgtgccctccagcagcttgggcacccagacctacatctgcaacgtgaatcacaagcccagcaacaccaaggtggacaagaaagttgagcccaaatcttgtgacaaaactcacacatgcccaccgtgcccagcacctgaactcctggggggaccggaagtcttcctcttccccccaaaacccaaggacaccctcatgatctcccggacccctgaggtcacatgcgtggtggtggacgtgagccacgaagaccctgaggtcaagttcaactggtacgtggacggcgtggaggtgcataatgccaagacaaagccgcgggaggagcagtacaacagcacgtaccgtgtggtcagcgtcctcaccgtcctgcaccaggactggctgaatggcaaggagtacaagtgcaaggtctccaacgaagccctcccagcccccatcgagaaaaccatctccaaagccaaagggcagccccgagaaccacaggtgtacaccctgcccccatcccgggatgagctgaccaagaaccaggtcagcctgacctgcctggtcaaaggcttctatcccagcgacatcgccgtggagtgggagagcaatgggcagccggagaacaactacaagaccacgcctcccgtgctggactccgacggctccttcttcctctacagcaagctcaccgtggacaagagcaggtggcagcaggggaacgtcttctcatgctccgtgatgcatgaggctctgcacaaccactacacgcagaagagcctctccctgtctccgggtaaatga

SEQ ID NO: 190 - protein, 330 aa, Artificial Sequence; identical to SEQ ID NO: 164
  Description of the artificial sequence: amino acid sequence of IgG1_S239E/K326E CH

SEQ ID NO: 191 - DNA, 993 bp, Artificial Sequence
  Description of the artificial sequence: base sequence of IgG1_S239E/K326I CH
gctagcaccaagggcccatcggtcttccccctggcaccctcctccaagagcacctctgggggcacagcggccctgggctgcctggtcaaggactacttccccgaaccggtgacggtgtcgtggaactcaggcgccctgaccagcggcgtgcacaccttcccggctgtcctacagtcctcaggactctactccctcagcagcgtggtgaccgtgccctccagcagcttgggcacccagacctacatctgcaacgtgaatcacaagcccagcaacaccaaggtggacaagaaagttgagcccaaatcttgtgacaaaactcacacatgcccaccgtgcccagcacctgaactcctggggggaccggaagtcttcctcttccccccaaaacccaaggacaccctcatgatctcccggacccctgaggtcacatgcgtggtggtggacgtgagccacgaagaccctgaggtcaagttcaactggtacgtggacggcgtggaggtgcataatgccaagacaaagccgcgggaggagcagtacaacagcacgtaccgtgtggtcagcgtcctcaccgtcctgcaccaggactggctgaatggcaaggagtacaagtgcaaggtctccaacatagccctcccagcccccatcgagaaaaccatctccaaagccaaagggcagccccgagaaccacaggtgtacaccctgcccccatcccgggatgagctgaccaagaaccaggtcagcctgacctgcctggtcaaaggcttctatcccagcgacatcgccgtggagtgggagagcaatgggcagccggagaacaactacaagaccacgcctcccgtgctggactccgacggctccttcttcctctacagcaagctcaccgtggacaagagcaggtggcagcaggggaacgtcttctcatgctccgtgatgcatgaggctctgcacaaccactacacgcagaagagcctctccctgtctccgggtaaatga

SEQ ID NO: 192 - protein, 330 aa, Artificial Sequence; identical to SEQ ID NO: 166
  Description of the artificial sequence: amino acid sequence of IgG1_S239E/K326I CH

SEQ ID NO: 193 - DNA, 993 bp, Artificial Sequence
  Description of the artificial sequence: base sequence of IgG1_F243L/R292P/Y300L CH
gctagcaccaagggcccatcggtcttccccctggcaccctcctccaagagcacctctgggggcacagcggccctgggctgcctggtcaaggactacttccccgaaccggtgacggtgtcgtggaactcaggcgccctgaccagcggcgtgcacaccttcccggctgtcctacagtcctcaggactctactccctcagcagcgtggtgaccgtgccctccagcagcttgggcacccagacctacatctgcaacgtgaatcacaagcccagcaacaccaaggtggacaagaaagttgagcccaaatcttgtgacaaaactcacacatgcccaccgtgcccagcacctgaactcctggggggaccgtcagtcttcctccttcccccaaaacccaaggacaccctcatgatctcccggacccctgaggtcacatgcgtggtggtggacgtgagccacgaagaccctgaggtcaagttcaactggtacgtggacggcgtggaggtgcataatgccaagacaaagccgccggaggagcagtacaacagcacgctacgtgtggtcagcgtcctcaccgtcctgcaccaggactggctgaatggcaaggagtacaagtgcaaggtctccaacaaagccctcccagcccccatcgagaaaaccatctccaaagccaaagggcagccccgagaaccacaggtgtacaccctgcccccatcccgggatgagctgaccaagaaccaggtcagcctgacctgcctggtcaaaggcttctatcccagcgacatcgccgtggagtgggagagcaatgggcagccggagaacaactacaagaccacgcctcccgtgctggactccgacggctccttcttcctctacagcaagctcaccgtggacaagagcaggtggcagcaggggaacgtcttctcatgctccgtgatgcatgaggctctgcacaaccactacacgcagaagagcctctccctgtctccgggtaaatga

SEQ ID NO: 194 - protein, 330 aa, Artificial Sequence
  Description of the artificial sequence: amino acid sequence of IgG1_F243L/R292P/Y300L CH
ASTKGPSVFPLAPSSKSTSGGTAALGCLVKDYFPEPVTVSWNSGALTSGVHTFPAVLQSSGLYSLSSVVTVPSSSLGTQTYICNVNHKPSNTKVDKKVEPKSCDKTHTCPPCPAPELLGGPSVFLLPPKPKDTLMISRTPEVTCVVVDVSHEDPEVKFNWYVDGVEVHNAKTKPPEEQYNSTLRVVSVLTVLHQDWLNGKEYKCKVSNKALPAPIEKTISKAKGQPREPQVYTLPPSRDELTKNQVSLTCLVKGFYPSDIAVEWESNGQPENNYKTTPPVLDSDGSFFLYSKLTVDKSRWQQGNVFSCSVMHEALHNHYTQKSLSLSPGK

SEQ ID NO: 195 - DNA, 993 bp, Artificial Sequence
  Description of the artificial sequence: base sequence of IgG1_F243L/R292P/Y300L/V305I/P396L CH
gctagcaccaagggcccatcggtcttccccctggcaccctcctccaagagcacctctgggggcacagcggccctgggctgcctggtcaaggactacttccccgaaccggtgacggtgtcgtggaactcaggcgccctgaccagcggcgtgcacaccttcccggctgtcctacagtcctcaggactctactccctcagcagcgtggtgaccgtgccctccagcagcttgggcacccagacctacatctgcaacgtgaatcacaagcccagcaacaccaaggtggacaagaaagttgagcccaaatcttgtgacaaaactcacacatgcccaccgtgcccagcacctgaactcctggggggaccgtcagtcttcctccttcccccaaaacccaaggacaccctcatgatctcccggacccctgaggtcacatgcgtggtggtggacgtgagccacgaagaccctgaggtcaagttcaactggtacgtggacggcgtggaggtgcataatgccaagacaaagccgccggaggagcagtacaacagcacgctacgtgtggtcagcatcctcaccgtcctgcaccaggactggctgaatggcaaggagtacaagtgcaaggtctccaacaaagccctcccagcccccatcgagaaaaccatctccaaagccaaagggcagccccgagaaccacaggtgtacaccctgcccccatcccgggatgagctgaccaagaaccaggtcagcctgacctgcctggtcaaaggcttctatcccagcgacatcgccgtggagtgggagagcaatgggcagccggagaacaactacaagaccacgcctcttgtgctggactccgacggctccttcttcctctacagcaagctcaccgtggacaagagcaggtggcagcaggggaacgtcttctcatgctccgtgatgcatgaggctctgcacaaccactacacgcagaagagcctctccctgtctccgggtaaatga

SEQ ID NO: 196 - protein, 330 aa, Artificial Sequence
  Description of the artificial sequence: amino acid sequence of IgG1_F243L/R292P/Y300L/V305I/P396L CH
ASTKGPSVFPLAPSSKSTSGGTAALGCLVKDYFPEPVTVSWNSGALTSGVHTFPAVLQSSGLYSLSSVVTVPSSSLGTQTYICNVNHKPSNTKVDKKVEPKSCDKTHTCPPCPAPELLGGPSVFLLPPKPKDTLMISRTPEVTCVVVDVSHEDPEVKFNWYVDGVEVHNAKTKPPEEQYNSTLRVVSILTVLHQDWLNGKEYKCKVSNKALPAPIEKTISKAKGQPREPQVYTLPPSRDELTKNQVSLTCLVKGFYPSDIAVEWESNGQPENNYKTTPLVLDSDGSFFLYSKLTVDKSRWQQGNVFSCSVMHEALHNHYTQKSLSLSPGK

SEQ ID NO: 197 - DNA, 993 bp, Artificial Sequence
  Description of the artificial sequence: base sequence of IgG1_P230A/E233D/I332E CH
gctagcaccaagggcccatcggtcttccccctggcaccctcctccaagagcacctctgggggcacagcggccctgggctgcctggtcaaggactacttccccgaaccggtgacggtgtcgtggaactcaggcgccctgaccagcggcgtgcacaccttcccggctgtcctacagtcctcaggactctactccctcagcagcgtggtgaccgtgccctccagcagcttgggcacccagacctacatctgcaacgtgaatcacaagcccagcaacaccaaggtggacaagaaagttgagcccaaatcttgtgacaaaactcacacatgcccaccgtgcgcagcacctgcactcctggggggaccgtcagtcttcctcttccccccaaaacccaaggacaccctcatgatctcccggacccctgaggtcacatgcgtggtggtggacgtgagccacgaagaccctgaggtcaagttcaactggtacgtggacggcgtggaggtgcataatgccaagacaaagccgcgggaggagcagtacaacagcacgtaccgtgtggtcagcgtcctcaccgtcctgcaccaggactggctgaatggcaaggagtacaagtgcaaggtctccaacaaagccctcccagcccccgaagagaaaaccatctccaaagccaaagggcagccccgagaaccacaggtgtacaccctgcccccatcccgggatgagctgaccaagaaccaggtcagcctgacctgcctggtcaaaggcttctatcccagcgacatcgccgtggagtgggagagcaatgggcagccggagaacaactacaagaccacgcctcccgtgctggactccgacggctccttcttcctctacagcaagctcaccgtggacaagagcaggtggcagcaggggaacgtcttctcatgctccgtgatgcatgaggctctgcacaaccactacacgcagaagagcctctccctgtctccgggtaaatga

SEQ ID NO: 198 - protein, 330 aa, Artificial Sequence
  Description of the artificial sequence: amino acid sequence of IgG1_P230A/E233D/I332E CH
ASTKGPSVFPLAPSSKSTSGGTAALGCLVKDYFPEPVTVSWNSGALTSGVHTFPAVLQSSGLYSLSSVVTVPSSSLGTQTYICNVNHKPSNTKVDKKVEPKSCDKTHTCPPCAAPALLGGPSVFLFPPKPKDTLMISRTPEVTCVVVDVSHEDPEVKFNWYVDGVEVHNAKTKPREEQYNSTYRVVSVLTVLHQDWLNGKEYKCKVSNKALPAPEEKTISKAKGQPREPQVYTLPPSRDELTKNQVSLTCLVKGFYPSDIAVEWESNGQPENNYKTTPPVLDSDGSFFLYSKLTVDKSRWQQGNVFSCSVMHEALHNHYTQKSLSLSPGK

SEQ ID NO: 199 - DNA, 993 bp, Artificial Sequence
  Description of the artificial sequence: base sequence of IgG1_K288N/A330S/P396L CH
gctagcaccaagggcccatcggtcttccccctggcaccctcctccaagagcacctctgggggcacagcggccctgggctgcctggtcaaggactacttccccgaaccggtgacggtgtcgtggaactcaggcgccctgaccagcggcgtgcacaccttcccggctgtcctacagtcctcaggactctactccctcagcagcgtggtgaccgtgccctccagcagcttgggcacccagacctacatctgcaacgtgaatcacaagcccagcaacaccaaggtggacaagaaagttgagcccaaatcttgtgacaaaactcacacatgcccaccgtgcccagcacctgaactcctggggggaccgtcagtcttcctcttccccccaaaacccaaggacaccctcatgatctcccggacccctgaggtcacatgcgtggtggtggacgtgagccacgaagaccctgaggtcaagttcaactggtacgtggacggcgtggaggtgcataatgccaacacaaagccgcgggaggagcagtacaacagcacgtaccgtgtggtcagcgtcctcaccgtcctgcaccaggactggctgaatggcaaggagtacaagtgcaaggtctccaacaaagccctcccatcccccatcgagaaaaccatctccaaagccaaagggcagccccgagaaccacaggtgtacaccctgcccccatcccgggatgagctgaccaagaaccaggtcagcctgacctgcctggtcaaaggcttctatcccagcgacatcgccgtggagtgggagagcaatgggcagccggagaacaactacaagaccacgcctcttgtgctggactccgacggctccttcttcctctacagcaagctcaccgtggacaagagcaggtggcagcaggggaacgtcttctcatgctccgtgatgcatgaggctctgcacaaccactacacgcagaagagcctctccctgtctccgggtaaatga

SEQ ID NO: 200 - protein, 330 aa, Artificial Sequence
  Description of the artificial sequence: amino acid sequence of IgG1_K288N/A330S/P396L CH
ASTKGPSVFPLAPSSKSTSGGTAALGCLVKDYFPEPVTVSWNSGALTSGVHTFPAVLQSSGLYSLSSVVTVPSSSLGTQTYICNVNHKPSNTKVDKKVEPKSCDKTHTCPPCPAPELLGGPSVFLFPPKPKDTLMISRTPEVTCVVVDVSHEDPEVKFNWYVDGVEVHNANTKPREEQYNSTYRVVSVLTVLHQDWLNGKEYKCKVSNKALPSPIEKTISKAKGQPREPQVYTLPPSRDELTKNQVSLTCLVKGFYPSDIAVEWESNGQPENNYKTTPLVLDSDGSFFLYSKLTVDKSRWQQGNVFSCSVMHEALHNHYTQKSLSLSPGK

SEQ ID NO: 201 - DNA, 993 bp, Artificial Sequence
  Description of the artificial sequence: base sequence of IgG1_K334E/T359N/T366S CH
gctagcaccaagggcccatcggtcttccccctggcaccctcctccaagagcacctctgggggcacagcggccctgggctgcctggtcaaggactacttccccgaaccggtgacggtgtcgtggaactcaggcgccctgaccagcggcgtgcacaccttcccggctgtcctacagtcctcaggactctactccctcagcagcgtggtgaccgtgccctccagcagcttgggcacccagacctacatctgcaacgtgaatcacaagcccagcaacaccaaggtggacaagaaagttgagcccaaatcttgtgacaaaactcacacatgcccaccgtgcccagcacctgaactcctggggggaccgtcagtcttcctcttccccccaaaacccaaggacaccctcatgatctcccggacccctgaggtcacatgcgtggtggtggacgtgagccacgaagaccctgaggtcaagttcaactggtacgtggacggcgtggaggtgcataatgccaagacaaagccgcgggaggagcagtacaacagcacgtaccgtgtggtcagcgtcctcaccgtcctgcaccaggactggctgaatggcaaggagtacaagtgcaaggtctccaacaaagccctcccagcccccatcgaggaaaccatctccaaagccaaagggcagccccgagaaccacaggtgtacaccctgcccccatcccgggatgagctgaacaagaaccaggtcagcctgtcctgcctggtcaaaggcttctatcccagcgacatcgccgtggagtgggagagcaatgggcagccggagaacaactacaagaccacgcctcccgtgctggactccgacggctccttcttcctctacagcaagctcaccgtggacaagagcaggtggcagcaggggaacgtcttctcatgctccgtgatgcatgaggctctgcacaaccactacacgcagaagagcctctccctgtctccgggtaaatga

SEQ ID NO: 202 - protein, 330 aa, Artificial Sequence
  Description of the artificial sequence: amino acid sequence of IgG1_K334E/T359N/T366S CH
ASTKGPSVFPLAPSSKSTSGGTAALGCLVKDYFPEPVTVSWNSGALTSGVHTFPAVLQSSGLYSLSSVVTVPSSSLGTQTYICNVNHKPSNTKVDKKVEPKSCDKTHTCPPCPAPELLGGPSVFLFPPKPKDTLMISRTPEVTCVVVDVSHEDPEVKFNWYVDGVEVHNAKTKPREEQYNSTYRVVSVLTVLHQDWLNGKEYKCKVSNKALPAPIEETISKAKGQPREPQVYTLPPSRDELNKNQVSLSCLVKGFYPSDIAVEWESNGQPENNYKTTPPVLDSDGSFFLYSKLTVDKSRWQQGNVFSCSVMHEALHNHYTQKSLSLSPGK

SEQ ID NO: 203 - DNA, 993 bp, Artificial Sequence
  Description of the artificial sequence: base sequence of IgG1_G316D/A378V/D399E CH
gctagcaccaagggcccatcggtcttccccctggcaccctcctccaagagcacctctgggggcacagcggccctgggctgcctggtcaaggactacttccccgaaccggtgacggtgtcgtggaactcaggcgccctgaccagcggcgtgcacaccttcccggctgtcctacagtcctcaggactctactccctcagcagcgtggtgaccgtgccctccagcagcttgggcacccagacctacatctgcaacgtgaatcacaagcccagcaacaccaaggtggacaagaaagttgagcccaaatcttgtgacaaaactcacacatgcccaccgtgcccagcacctgaactcctggggggaccgtcagtcttcctcttccccccaaaacccaaggacaccctcatgatctcccggacccctgaggtcacatgcgtggtggtggacgtgagccacgaagaccctgaggtcaagttcaactggtacgtggacggcgtggaggtgcataatgccaagacaaagccgcgggaggagcagtacaacagcacgtaccgtgtggtcagcgtcctcaccgtcctgcaccaggactggctgaatgacaaggagtacaagtgcaaggtctccaacaaagccctcccagcccccatcgagaaaaccatctccaaagccaaagggcagccccgagaaccacaggtgtacaccctgcccccatcccgggatgagctgaccaagaaccaggtcagcctgacctgcctggtcaaaggcttctatcccagcgacatcgtcgtggagtgggagagcaatgggcagccggagaacaactacaagaccacgcctcccgtgctggagtccgacggctccttcttcctctacagcaagctcaccgtggacaagagcaggtggcagcaggggaacgtcttctcatgctccgtgatgcatgaggctctgcacaaccactacacgcagaagagcctctccctgtctccgggtaaatga

SEQ ID NO: 204 - protein, 330 aa, Artificial Sequence
  Description of the artificial sequence: amino acid sequence of IgG1_G316D/A378V/D399E CH
ASTKGPSVFPLAPSSKSTSGGTAALGCLVKDYFPEPVTVSWNSGALTSGVHTFPAVLQSSGLYSLSSVVTVPSSSLGTQTYICNVNHKPSNTKVDKKVEPKSCDKTHTCPPCPAPELLGGPSVFLFPPKPKDTLMISRTPEVTCVVVDVSHEDPEVKFNWYVDGVEVHNAKTKPREEQYNSTYRVVSVLTVLHQDWLNDKEYKCKVSNKALPAPIEKTISKAKGQPREPQVYTLPPSRDELTKNQVSLTCLVKGFYPSDIVVEWESNGQPENNYKTTPPVLESDGSFFLYSKLTVDKSRWQQGNVFSCSVMHEALHNHYTQKSLSLSPGK

SEQ ID NO: 205 - DNA, 993 bp, Artificial Sequence
  Description of the artificial sequence: base sequence of CD4_IgG1_AA_DE_D265A_K409R CH
gctagcaccaagggcccatcggtcttccccctggcaccctcctccaagagcacctctgggggcacagcggccctgggctgcctggtcaaggactacttccccgaaccggtgacggtgtcgtggaactcaggcgccctgaccagcggcgtgcacaccttcccggctgtcctacagtcctcaggactctactccctcagcagcgtggtgaccgtgccctccagcagcttgggcacccagacctacatctgcaacgtgaatcacaagcccagcaacaccaaggtggacaagaaagttgagcccaaatcttgtgacaaaactcacacagcgccaccggcgccagcacctgaactcctggggggaccggatgtcttcctcttccccccaaaacccaaggacaccctcatgatctcccggacccctgaggtcacatgcgtggtggtggccgtgagccacgaagaccctgaggtcaagttcaactggtacgtggacggcgtggaggtgcataatgccaagacaaagccgcgggaggagcagtacaacagcacgtaccgtgtggtcagcgtcctcaccgtcctgcaccaggactggctgaatggcaaggagtacaagtgcaaggtctccaacaaagccctcccagcccccgaagagaaaaccatctccaaagccaaagggcagccccgagaaccacaggtgtacaccctgcccccatcccgggatgagctgaccaagaaccaggtcagcctgacctgcctggtcaaaggcttctatcccagcgacatcgccgtggagtgggagagcaatgggcagccggagaacaactacaagaccacgcctcccgtgctggactccgacggctccttcttcctctacagccggctcaccgtggacaagagcaggtggcagcaggggaacgtcttctcatgctccgtgatgcatgaggctctgcacaaccactacacgcagaagagcctctccctgtctccgggtaaatga

SEQ ID NO: 206 - protein, 330 aa, Artificial Sequence
  Description of the artificial sequence: amino acid sequence of CD4_IgG1_AA_DE_D265A_K409R CH
ASTKGPSVFPLAPSSKSTSGGTAALGCLVKDYFPEPVTVSWNSGALTSGVHTFPAVLQSSGLYSLSSVVTVPSSSLGTQTYICNVNHKPSNTKVDKKVEPKSCDKTHTAPPAPAPELLGGPDVFLFPPKPKDTLMISRTPEVTCVVVAVSHEDPEVKFNWYVDGVEVHNAKTKPREEQYNSTYRVVSVLTVLHQDWLNGKEYKCKVSNKALPAPEEKTISKAKGQPREPQVYTLPPSRDELTKNQVSLTCLVKGFYPSDIAVEWESNGQPENNYKTTPPVLDSDGSFFLYSRLTVDKSRWQQGNVFSCSVMHEALHNHYTQKSLSLSPGK

SEQ ID NO: 207 - DNA, 993 bp, Artificial Sequence
  Description of the artificial sequence: base sequence of CD4_IgG1_AA_DE_D265A_Y349A CH
gctagcaccaagggcccatcggtcttccccctggcaccctcctccaagagcacctctgggggcacagcggccctgggctgcctggtcaaggactacttccccgaaccggtgacggtgtcgtggaactcaggcgccctgaccagcggcgtgcacaccttcccggctgtcctacagtcctcaggactctactccctcagcagcgtggtgaccgtgccctccagcagcttgggcacccagacctacatctgcaacgtgaatcacaagcccagcaacaccaaggtggacaagaaagttgagcccaaatcttgtgacaaaactcacacagcgccaccggcgccagcacctgaactcctggggggaccggatgtcttcctcttccccccaaaacccaaggacaccctcatgatctcccggacccctgaggtcacatgcgtggtggtggccgtgagccacgaagaccctgaggtcaagttcaactggtacgtggacggcgtggaggtgcataatgccaagacaaagccgcgggaggagcagtacaacagcacgtaccgtgtggtcagcgtcctcaccgtcctgcaccaggactggctgaatggcaaggagtacaagtgcaaggtctccaacaaagccctcccagcccccgaagagaaaaccatctccaaagccaaagggcagccccgagagccacaggtggcgaccctgcccccatcccaggaggagatgaccaagaaccaggtcagcctgacctgcctggtcaaaggcttctaccccagcgacatcgccgtggagtgggagagcaatgggcagccggagaacaactacaagaccacgcctcccgtgctggactccgacggctccttcttcctctacagcaggctaaccgtggacaagagcaggtggcaggaggggaatgtcttctcatgctccgtgatgcatgaggctctgcacaaccactacacacagaagagcctctccctgtctctgggtaaatga

SEQ ID NO: 208 - protein, 330 aa, Artificial Sequence
  Description of the artificial sequence: amino acid sequence of CD4_IgG1_AA_DE_D265A_Y349A CH
ASTKGPSVFPLAPSSKSTSGGTAALGCLVKDYFPEPVTVSWNSGALTSGVHTFPAVLQSSGLYSLSSVVTVPSSSLGTQTYICNVNHKPSNTKVDKKVEPKSCDKTHTAPPAPAPELLGGPDVFLFPPKPKDTLMISRTPEVTCVVVAVSHEDPEVKFNWYVDGVEVHNAKTKPREEQYNSTYRVVSVLTVLHQDWLNGKEYKCKVSNKALPAPEEKTISKAKGQPREPQVATLPPSQEEMTKNQVSLTCLVKGFYPSDIAVEWESNGQPENNYKTTPPVLDSDGSFFLYSRLTVDKSRWQEGNVFSCSVMHEALHNHYTQKSLSLSLGK

SEQ ID NO: 209 - DNA, 993 bp, Artificial Sequence
  Description of the artificial sequence: base sequence of CD4_IgG1_AA_DE_D265A_L351A CH
gctagcaccaagggcccatcggtcttccccctggcaccctcctccaagagcacctctgggggcacagcggccctgggctgcctggtcaaggactacttccccgaaccggtgacggtgtcgtggaactcaggcgccctgaccagcggcgtgcacaccttcccggctgtcctacagtcctcaggactctactccctcagcagcgtggtgaccgtgccctccagcagcttgggcacccagacctacatctgcaacgtgaatcacaagcccagcaacaccaaggtggacaagaaagttgagcccaaatcttgtgacaaaactcacacagcgccaccggcgccagcacctgaactcctggggggaccggatgtcttcctcttccccccaaaacccaaggacaccctcatgatctcccggacccctgaggtcacatgcgtggtggtggccgtgagccacgaagaccctgaggtcaagttcaactggtacgtggacggcgtggaggtgcataatgccaagacaaagccgcgggaggagcagtacaacagcacgtaccgtgtggtcagcgtcctcaccgtcctgcaccaggactggctgaatggcaaggagtacaagtgcaaggtctccaacaaagccctcccagcccccgaagagaaaaccatctccaaagccaaagggcagccccgagagccacaggtgtacaccgcgcccccatcccaggaggagatgaccaagaaccaggtcagcctgacctgcctggtcaaaggcttctaccccagcgacatcgccgtggagtgggagagcaatgggcagccggagaacaactacaagaccacgcctcccgtgctggactccgacggctccttcttcctctacagcaggctaaccgtggacaagagcaggtggcaggaggggaatgtcttctcatgctccgtgatgcatgaggctctgcacaaccactacacacagaagagcctctccctgtctctgggtaaatga

SEQ ID NO: 210 - protein, 330 aa, Artificial Sequence
  Description of the artificial sequence: amino acid sequence of CD4_IgG1_AA_DE_D265A_L351A CH
ASTKGPSVFPLAPSSKSTSGGTAALGCLVKDYFPEPVTVSWNSGALTSGVHTFPAVLQSSGLYSLSSVVTVPSSSLGTQTYICNVNHKPSNTKVDKKVEPKSCDKTHTAPPAPAPELLGGPDVFLFPPKPKDTLMISRTPEVTCVVVAVSHEDPEVKFNWYVDGVEVHNAKTKPREEQYNSTYRVVSVLTVLHQDWLNGKEYKCKVSNKALPAPEEKTISKAKGQPREPQVYTAPPSQEEMTKNQVSLTCLVKGFYPSDIAVEWESNGQPENNYKTTPPVLDSDGSFFLYSRLTVDKSRWQEGNVFSCSVMHEALHNHYTQKSLSLSLGK

SEQ ID NO: 211 - DNA, 993 bp, Artificial Sequence
  Description of the artificial sequence: base sequence of CD4_IgG1_AA_DE_D265A_T366A CH
gctagcaccaagggcccatcggtcttccccctggcaccctcctccaagagcacctctgggggcacagcggccctgggctgcctggtcaaggactacttccccgaaccggtgacggtgtcgtggaactcaggcgccctgaccagcggcgtgcacaccttcccggctgtcctacagtcctcaggactctactccctcagcagcgtggtgaccgtgccctccagcagcttgggcacccagacctacatctgcaacgtgaatcacaagcccagcaacaccaaggtggacaagaaagttgagcccaaatcttgtgacaaaactcacacagcgccaccggcgccagcacctgaactcctggggggaccggatgtcttcctcttccccccaaaacccaaggacaccctcatgatctcccggacccctgaggtcacatgcgtggtggtggccgtgagccacgaagaccctgaggtcaagttcaactggtacgtggacggcgtggaggtgcataatgccaagacaaagccgcgggaggagcagtacaacagcacgtaccgtgtggtcagcgtcctcaccgtcctgcaccaggactggctgaatggcaaggagtacaagtgcaaggtctccaacaaagccctcccagcccccgaagagaaaaccatctccaaagccaaagggcagccccgagagccacaggtgtacaccctgcccccatcccaggaggagatgaccaagaaccaggtcagcctggcgtgcctggtcaaaggcttctaccccagcgacatcgccgtggagtgggagagcaatgggcagccggagaacaactacaagaccacgcctcccgtgctggactccgacggctccttcttcctctacagcaggctaaccgtggacaagagcaggtggcaggaggggaatgtcttctcatgctccgtgatgcatgaggctctgcacaaccactacacacagaagagcctctccctgtctctgggtaaatga

SEQ ID NO: 212 - protein, 330 aa, Artificial Sequence
  Description of the artificial sequence: amino acid sequence of CD4_IgG1_AA_DE_D265A_T366A CH
ASTKGPSVFPLAPSSKSTSGGTAALGCLVKDYFPEPVTVSWNSGALTSGVHTFPAVLQSSGLYSLSSVVTVPSSSLGTQTYICNVNHKPSNTKVDKKVEPKSCDKTHTAPPAPAPELLGGPDVFLFPPKPKDTLMISRTPEVTCVVVAVSHEDPEVKFNWYVDGVEVHNAKTKPREEQYNSTYRVVSVLTVLHQDWLNGKEYKCKVSNKALPAPEEKTISKAKGQPREPQVYTLPPSQEEMTKNQVSLACLVKGFYPSDIAVEWESNGQPENNYKTTPPVLDSDGSFFLYSRLTVDKSRWQEGNVFSCSVMHEALHNHYTQKSLSLSLGK

SEQ ID NO: 213 - DNA, 993 bp, Artificial Sequence
  Description of the artificial sequence: base sequence of CD4_IgG1_AA_DE_D265A_L368A CH
gctagcaccaagggcccatcggtcttccccctggcaccctcctccaagagcacctctgggggcacagcggccctgggctgcctggtcaaggactacttccccgaaccggtgacggtgtcgtggaactcaggcgccctgaccagcggcgtgcacaccttcccggctgtcctacagtcctcaggactctactccctcagcagcgtggtgaccgtgccctccagcagcttgggcacccagacctacatctgcaacgtgaatcacaagcccagcaacaccaaggtggacaagaaagttgagcccaaatcttgtgacaaaactcacacagcgccaccggcgccagcacctgaactcctggggggaccggatgtcttcctcttccccccaaaacccaaggacaccctcatgatctcccggacccctgaggtcacatgcgtggtggtggccgtgagccacgaagaccctgaggtcaagttcaactggtacgtggacggcgtggaggtgcataatgccaagacaaagccgcgggaggagcagtacaacagcacgtaccgtgtggtcagcgtcctcaccgtcctgcaccaggactggctgaatggcaaggagtacaagtgcaaggtctccaacaaagccctcccagcccccgaagagaaaaccatctccaaagccaaagggcagccccgagagccacaggtgtacaccctgcccccatcccaggaggagatgaccaagaaccaggtcagcctgacctgcgcggtcaaaggcttctaccccagcgacatcgccgtggagtgggagagcaatgggcagccggagaacaactacaagaccacgcctcccgtgctggactccgacggctccttcttcctctacagcaggctaaccgtggacaagagcaggtggcaggaggggaatgtcttctcatgctccgtgatgcatgaggctctgcacaaccactacacacagaagagcctctccctgtctctgggtaaatga

SEQ ID NO: 214 - protein, 330 aa, Artificial Sequence
  Description of the artificial sequence: amino acid sequence of CD4_IgG1_AA_DE_D265A_L368A CH
ASTKGPSVFPLAPSSKSTSGGTAALGCLVKDYFPEPVTVSWNSGALTSGVHTFPAVLQSSGLYSLSSVVTVPSSSLGTQTYICNVNHKPSNTKVDKKVEPKSCDKTHTAPPAPAPELLGGPDVFLFPPKPKDTLMISRTPEVTCVVVAVSHEDPEVKFNWYVDGVEVHNAKTKPREEQYNSTYRVVSVLTVLHQDWLNGKEYKCKVSNKALPAPEEKTISKAKGQPREPQVYTLPPSQEEMTKNQVSLTCAVKGFYPSDIAVEWESNGQPENNYKTTPPVLDSDGSFFLYSRLTVDKSRWQEGNVFSCSVMHEALHNHYTQKSLSLSLGK

SEQ ID NO: 215 - DNA, 993 bp, Artificial Sequence
  Description of the artificial sequence: base sequence of CD4_IgG1_AA_DE_D265A_D399A CH
gctagcaccaagggcccatcggtcttccccctggcaccctcctccaagagcacctctgggggcacagcggccctgggctgcctggtcaaggactacttccccgaaccggtgacggtgtcgtggaactcaggcgccctgaccagcggcgtgcacaccttcccggctgtcctacagtcctcaggactctactccctcagcagcgtggtgaccgtgccctccagcagcttgggcacccagacctacatctgcaacgtgaatcacaagcccagcaacaccaaggtggacaagaaagttgagcccaaatcttgtgacaaaactcacacagcgccaccggcgccagcacctgaactcctggggggaccggatgtcttcctcttccccccaaaacccaaggacaccctcatgatctcccggacccctgaggtcacatgcgtggtggtggccgtgagccacgaagaccctgaggtcaagttcaactggtacgtggacggcgtggaggtgcataatgccaagacaaagccgcgggaggagcagtacaacagcacgtaccgtgtggtcagcgtcctcaccgtcctgcaccaggactggctgaatggcaaggagtacaagtgcaaggtctccaacaaagccctcccagcccccgaagagaaaaccatctccaaagccaaagggcagccccgagagccacaggtgtacaccctgcccccatcccaggaggagatgaccaagaaccaggtcagcctgacctgcctggtcaaaggcttctaccccagcgacatcgccgtggagtgggagagcaatgggcagccggagaacaactacaagaccacgcctcccgtgctggcgtccgacggctccttcttcctctacagcaggctaaccgtggacaagagcaggtggcaggaggggaatgtcttctcatgctccgtgatgcatgaggctctgcacaaccactacacacagaagagcctctccctgtctctgggtaaatga

SEQ ID NO: 216 - protein, 330 aa, Artificial Sequence
  Description of the artificial sequence: amino acid sequence of CD4_IgG1_AA_DE_D265A_D399A CH
ASTKGPSVFPLAPSSKSTSGGTAALGCLVKDYFPEPVTVSWNSGALTSGVHTFPAVLQSSGLYSLSSVVTVPSSSLGTQTYICNVNHKPSNTKVDKKVEPKSCDKTHTAPPAPAPELLGGPDVFLFPPKPKDTLMISRTPEVTCVVVAVSHEDPEVKFNWYVDGVEVHNAKTKPREEQYNSTYRVVSVLTVLHQDWLNGKEYKCKVSNKALPAPEEKTISKAKGQPREPQVYTLPPSQEEMTKNQVSLTCLVKGFYPSDIAVEWESNGQPENNYKTTPPVLASDGSFFLYSRLTVDKSRWQEGNVFSCSVMHEALHNHYTQKSLSLSLGK

SEQ ID NO: 217 - DNA, 993 bp, Artificial Sequence
  Description of the artificial sequence: base sequence of CD4_IgG1_AA_DE_D265A_F405A CH
gctagcaccaagggcccatcggtcttccccctggcaccctcctccaagagcacctctgggggcacagcggccctgggctgcctggtcaaggactacttccccgaaccggtgacggtgtcgtggaactcaggcgccctgaccagcggcgtgcacaccttcccggctgtcctacagtcctcaggactctactccctcagcagcgtggtgaccgtgccctccagcagcttgggcacccagacctacatctgcaacgtgaatcacaagcccagcaacaccaaggtggacaagaaagttgagcccaaatcttgtgacaaaactcacacagcgccaccggcgccagcacctgaactcctggggggaccggatgtcttcctcttccccccaaaacccaaggacaccctcatgatctcccggacccctgaggtcacatgcgtggtggtggccgtgagccacgaagaccctgaggtcaagttcaactggtacgtggacggcgtggaggtgcataatgccaagacaaagccgcgggaggagcagtacaacagcacgtaccgtgtggtcagcgtcctcaccgtcctgcaccaggactggctgaatggcaaggagtacaagtgcaaggtctccaacaaagccctcccagcccccgaagagaaaaccatctccaaagccaaagggcagccccgagagccacaggtgtacaccctgcccccatcccaggaggagatgaccaagaaccaggtcagcctgacctgcctggtcaaaggcttctaccccagcgacatcgccgtggagtgggagagcaatgggcagccggagaacaactacaagaccacgcctcccgtgctggactccgacggctccttcgcgctctacagcaggctaaccgtggacaagagcaggtggcaggaggggaatgtcttctcatgctccgtgatgcatgaggctctgcacaaccactacacacagaagagcctctccctgtctctgggtaaatga

SEQ ID NO: 218 - protein, 330 aa, Artificial Sequence
  Description of the artificial sequence: amino acid sequence of CD4_IgG1_AA_DE_D265A_F405A CH
ASTKGPSVFPLAPSSKSTSGGTAALGCLVKDYFPEPVTVSWNSGALTSGVHTFPAVLQSSGLYSLSSVVTVPSSSLGTQTYICNVNHKPSNTKVDKKVEPKSCDKTHTAPPAPAPELLGGPDVFLFPPKPKDTLMISRTPEVTCVVVAVSHEDPEVKFNWYVDGVEVHNAKTKPREEQYNSTYRVVSVLTVLHQDWLNGKEYKCKVSNKALPAPEEKTISKAKGQPREPQVYTLPPSQEEMTKNQVSLTCLVKGFYPSDIAVEWESNGQPENNYKTTPPVLDSDGSFALYSRLTVDKSRWQEGNVFSCSVMHEALHNHYTQKSLSLSLGK

SEQ ID NO: 219 - DNA, 993 bp, Artificial Sequence
  Description of the artificial sequence: base sequence of CD4_IgG1_AA_DE_D265A_Y407A CH
gctagcaccaagggcccatcggtcttccccctggcaccctcctccaagagcacctctgggggcacagcggccctgggctgcctggtcaaggactacttccccgaaccggtgacggtgtcgtggaactcaggcgccctgaccagcggcgtgcacaccttcccggctgtcctacagtcctcaggactctactccctcagcagcgtggtgaccgtgccctccagcagcttgggcacccagacctacatctgcaacgtgaatcacaagcccagcaacaccaaggtggacaagaaagttgagcccaaatcttgtgacaaaactcacacagcgccaccggcgccagcacctgaactcctggggggaccggatgtcttcctcttccccccaaaacccaaggacaccctcatgatctcccggacccctgaggtcacatgcgtggtggtggccgtgagccacgaagaccctgaggtcaagttcaactggtacgtggacggcgtggaggtgcataatgccaagacaaagccgcgggaggagcagtacaacagcacgtaccgtgtggtcagcgtcctcaccgtcctgcaccaggactggctgaatggcaaggagtacaagtgcaaggtctccaacaaagccctcccagcccccgaagagaaaaccatctccaaagccaaagggcagccccgagagccacaggtgtacaccctgcccccatcccaggaggagatgaccaagaaccaggtcagcctgacctgcctggtcaaaggcttctaccccagcgacatcgccgtggagtgggagagcaatgggcagccggagaacaactacaagaccacgcctcccgtgctggactccgacggctccttcttcctcgcgagcaggctaaccgtggacaagagcaggtggcaggaggggaatgtcttctcatgctccgtgatgcatgaggctctgcacaaccactacacacagaagagcctctccctgtctctgggtaaatga

SEQ ID NO: 220 - protein, 330 aa, Artificial Sequence
  Description of the artificial sequence: amino acid sequence of CD4_IgG1_AA_DE_D265A_Y407A CH
ASTKGPSVFPLAPSSKSTSGGTAALGCLVKDYFPEPVTVSWNSGALTSGVHTFPAVLQSSGLYSLSSVVTVPSSSLGTQTYICNVNHKPSNTKVDKKVEPKSCDKTHTAPPAPAPELLGGPDVFLFPPKPKDTLMISRTPEVTCVVVAVSHEDPEVKFNWYVDGVEVHNAKTKPREEQYNSTYRVVSVLTVLHQDWLNGKEYKCKVSNKALPAPEEKTISKAKGQPREPQVYTLPPSQEEMTKNQVSLTCLVKGFYPSDIAVEWESNGQPENNYKTTPPVLDSDGSFFLASRLTVDKSRWQEGNVFSCSVMHEALHNHYTQKSLSLSLGK

SEQ ID NO: 221 - DNA, 993 bp, Artificial Sequence
  Description of the artificial sequence: base sequence of CD4_IgG1_AA_DE_D265A_K409A CH
gctagcaccaagggcccatcggtcttccccctggcaccctcctccaagagcacctctgggggcacagcggccctgggctgcctggtcaaggactacttccccgaaccggtgacggtgtcgtggaactcaggcgccctgaccagcggcgtgcacaccttcccggctgtcctacagtcctcaggactctactccctcagcagcgtggtgaccgtgccctccagcagcttgggcacccagacctacatctgcaacgtgaatcacaagcccagcaacaccaaggtggacaagaaagttgagcccaaatcttgtgacaaaactcacacagcgccaccggcgccagcacctgaactcctggggggaccggatgtcttcctcttccccccaaaacccaaggacaccctcatgatctcccggacccctgaggtcacatgcgtggtggtggccgtgagccacgaagaccctgaggtcaagttcaactggtacgtggacggcgtggaggtgcataatgccaagacaaagccgcgggaggagcagtacaacagcacgtaccgtgtggtcagcgtcctcaccgtcctgcaccaggactggctgaatggcaaggagtacaagtgcaaggtctccaacaaagccctcccagcccccgaagagaaaaccatctccaaagccaaagggcagccccgagagccacaggtgtacaccctgcccccatcccaggaggagatgaccaagaaccaggtcagcctgacctgcctggtcaaaggcttctaccccagcgacatcgccgtggagtgggagagcaatgggcagccggagaacaactacaagaccacgcctcccgtgctggactccgacggctccttcttcctctacagcgcgctaaccgtggacaagagcaggtggcaggaggggaatgtcttctcatgctccgtgatgcatgaggctctgcacaaccactacacacagaagagcctctccctgtctctgggtaaatga

SEQ ID NO: 222 - protein, 186 aa, Artificial Sequence
  Description of the artificial sequence: amino acid sequence of CD4_IgG1_AA_DE_D265A_K409A CH
VVVAVSHEDPEVKFNWYVDGVEVHNAKTKPREEQYNSTYRVVSVLTVLHQDWLNGKEYKCKVSNKALPAPEEKTISKAKGQPREPQVYTLPPSQEEMTKNQVSLTCLVKGFYPSDIAVEWESNGQPENNYKTTPPVLDSDGSFFLYSALTVDKSRWQEGNVFSCSVMHEALHNHYTQKSLSLSLGK

SEQ ID NO: 223 - DNA, 993 bp, Artificial Sequence
  Description of the artificial sequence: base sequence of CD70_IgG1_AA_DE_P329Y_K409R CH
gctagcaccaagggcccatcggtcttccccctggcaccctcctccaagagcacctctgggggcacagcggccctgggctgcctggtcaaggactacttccccgaaccggtgacggtgtcgtggaactcaggcgccctgaccagcggcgtgcacaccttcccggctgtcctacagtcctcaggactctactccctcagcagcgtggtgaccgtgccctccagcagcttgggcacccagacctacatctgcaacgtgaatcacaagcccagcaacaccaaggtggacaagaaagttgagcccaaatcttgtgacaaaactcacacagcgccaccggcgccagcacctgaactcctggggggaccggatgtcttcctcttccccccaaaacccaaggacaccctcatgatctcccggacccctgaggtcacatgcgtggtggtggacgtgagccacgaagaccctgaggtcaagttcaactggtacgtggacggcgtggaggtgcataatgccaagacaaagccgcgggaggagcagtacaacagcacgtaccgtgtggtcagcgtcctcaccgtcctgcaccaggactggctgaatggcaaggagtacaagtgcaaggtctccaacaaagccctctacgcccccgaagagaaaaccatctccaaagccaaagggcagccccgagaaccacaggtgtacaccctgcccccatcccgggatgagctgaccaagaaccaggtcagcctgacctgcctggtcaaaggcttctatcccagcgacatcgccgtggagtgggagagcaatgggcagccggagaacaactacaagaccacgcctcccgtgctggactccgacggctccttcttcctctacagccggctcaccgtggacaagagcaggtggcagcaggggaacgtcttctcatgctccgtgatgcatgaggctctgcacaaccactacacgcagaagagcctctccctgtctccgggtaaatga

SEQ ID NO: 224 - protein, 330 aa, Artificial Sequence
  Description of the artificial sequence: amino acid sequence of CD70_IgG1_AA_DE_P329Y_K409R CH
ASTKGPSVFPLAPSSKSTSGGTAALGCLVKDYFPEPVTVSWNSGALTSGVHTFPAVLQSSGLYSLSSVVTVPSSSLGTQTYICNVNHKPSNTKVDKKVEPKSCDKTHTAPPAPAPELLGGPDVFLFPPKPKDTLMISRTPEVTCVVVDVSHEDPEVKFNWYVDGVEVHNAKTKPREEQYNSTYRVVSVLTVLHQDWLNGKEYKCKVSNKALYAPEEKTISKAKGQPREPQVYTLPPSRDELTKNQVSLTCLVKGFYPSDIAVEWESNGQPENNYKTTPPVLDSDGSFFLYSRLTVDKSRWQQGNVFSCSVMHEALHNHYTQKSLSLSPGK

SEQ ID NO: 225 - DNA, 993 bp, Artificial Sequence
  Description of the artificial sequence: base sequence of CD70_IgG1_AA_DE_P329Y_Y349A CH
gctagcaccaagggcccatcggtcttccccctggcaccctcctccaagagcacctctgggggcacagcggccctgggctgcctggtcaaggactacttccccgaaccggtgacggtgtcgtggaactcaggcgccctgaccagcggcgtgcacaccttcccggctgtcctacagtcctcaggactctactccctcagcagcgtggtgaccgtgccctccagcagcttgggcacccagacctacatctgcaacgtgaatcacaagcccagcaacaccaaggtggacaagaaagttgagcccaaatcttgtgacaaaactcacacagcgccaccggcgccagcacctgaactcctggggggaccggatgtcttcctcttccccccaaaacccaaggacaccctcatgatctcccggacccctgaggtcacatgcgtggtggtggacgtgagccacgaagaccctgaggtcaagttcaactggtacgtggacggcgtggaggtgcataatgccaagacaaagccgcgggaggagcagtacaacagcacgtaccgtgtggtcagcgtcctcaccgtcctgcaccaggactggctgaatggcaaggagtacaagtgcaaggtctccaacaaagccctctacgcccccgaagagaaaaccatctccaaagccaaagggcagccccgagagccacaggtggcgaccctgcccccatcccaggaggagatgaccaagaaccaggtcagcctgacctgcctggtcaaaggcttctaccccagcgacatcgccgtggagtgggagagcaatgggcagccggagaacaactacaagaccacgcctcccgtgctggactccgacggctccttcttcctctacagcaggctaaccgtggacaagagcaggtggcaggaggggaatgtcttctcatgctccgtgatgcatgaggctctgcacaaccactacacacagaagagcctctccctgtctctgggtaaatga

SEQ ID NO: 226 - protein, 330 aa, Artificial Sequence
  Description of the artificial sequence: amino acid sequence of CD70_IgG1_AA_DE_P329Y_Y349A CH
ASTKGPSVFPLAPSSKSTSGGTAALGCLVKDYFPEPVTVSWNSGALTSGVHTFPAVLQSSGLYSLSSVVTVPSSSLGTQTYICNVNHKPSNTKVDKKVEPKSCDKTHTAPPAPAPELLGGPDVFLFPPKPKDTLMISRTPEVTCVVVDVSHEDPEVKFNWYVDGVEVHNAKTKPREEQYNSTYRVVSVLTVLHQDWLNGKEYKCKVSNKALYAPEEKTISKAKGQPREPQVATLPPSQEEMTKNQVSLTCLVKGFYPSDIAVEWESNGQPENNYKTTPPVLDSDGSFFLYSRLTVDKSRWQEGNVFSCSVMHEALHNHYTQKSLSLSLGK

SEQ ID NO: 227 - DNA, 993 bp, Artificial Sequence
  Description of the artificial sequence: base sequence of CD70_IgG1_AA_DE_P329Y_L351A CH
gctagcaccaagggcccatcggtcttccccctggcaccctcctccaagagcacctctgggggcacagcggccctgggctgcctggtcaaggactacttccccgaaccggtgacggtgtcgtggaactcaggcgccctgaccagcggcgtgcacaccttcccggctgtcctacagtcctcaggactctactccctcagcagcgtggtgaccgtgccctccagcagcttgggcacccagacctacatctgcaacgtgaatcacaagcccagcaacaccaaggtggacaagaaagttgagcccaaatcttgtgacaaaactcacacagcgccaccggcgccagcacctgaactcctggggggaccggatgtcttcctcttccccccaaaacccaaggacaccctcatgatctcccggacccctgaggtcacatgcgtggtggtggacgtgagccacgaagaccctgaggtcaagttcaactggtacgtggacggcgtggaggtgcataatgccaagacaaagccgcgggaggagcagtacaacagcacgtaccgtgtggtcagcgtcctcaccgtcctgcaccaggactggctgaatggcaaggagtacaagtgcaaggtctccaacaaagccctctacgcccccgaagagaaaaccatctccaaagccaaagggcagccccgagagccacaggtgtacaccgcgcccccatcccaggaggagatgaccaagaaccaggtcagcctgacctgcctggtcaaaggcttctaccccagcgacatcgccgtggagtgggagagcaatgggcagccggagaacaactacaagaccacgcctcccgtgctggactccgacggctccttcttcctctacagcaggctaaccgtggacaagagcaggtggcaggaggggaatgtcttctcatgctccgtgatgcatgaggctctgcacaaccactacacacagaagagcctctccctgtctctgggtaaatga

SEQ ID NO: 228 - protein, 330 aa, Artificial Sequence
  Description of the artificial sequence: amino acid sequence of CD70_IgG1_AA_DE_P329Y_L351A CH
ASTKGPSVFPLAPSSKSTSGGTAALGCLVKDYFPEPVTVSWNSGALTSGVHTFPAVLQSSGLYSLSSVVTVPSSSLGTQTYICNVNHKPSNTKVDKKVEPKSCDKTHTAPPAPAPELLGGPDVFLFPPKPKDTLMISRTPEVTCVVVDVSHEDPEVKFNWYVDGVEVHNAKTKPREEQYNSTYRVVSVLTVLHQDWLNGKEYKCKVSNKALYAPEEKTISKAKGQPREPQVYTAPPSQEEMTKNQVSLTCLVKGFYPSDIAVEWESNGQPENNYKTTPPVLDSDGSFFLYSRLTVDKSRWQEGNVFSCSVMHEALHNHYTQKSLSLSLGK

SEQ ID NO: 229 - DNA, 993 bp, Artificial Sequence
  Description of the artificial sequence: base sequence of CD70_IgG1_AA_DE_P329Y_T366A CH
gctagcaccaagggcccatcggtcttccccctggcaccctcctccaagagcacctctgggggcacagcggccctgggctgcctggtcaaggactacttccccgaaccggtgacggtgtcgtggaactcaggcgccctgaccagcggcgtgcacaccttcccggctgtcctacagtcctcaggactctactccctcagcagcgtggtgaccgtgccctccagcagcttgggcacccagacctacatctgcaacgtgaatcacaagcccagcaacaccaaggtggacaagaaagttgagcccaaatcttgtgacaaaactcacacagcgccaccggcgccagcacctgaactcctggggggaccggatgtcttcctcttccccccaaaacccaaggacaccctcatgatctcccggacccctgaggtcacatgcgtggtggtggacgtgagccacgaagaccctgaggtcaagttcaactggtacgtggacggcgtggaggtgcataatgccaagacaaagccgcgggaggagcagtacaacagcacgtaccgtgtggtcagcgtcctcaccgtcctgcaccaggactggctgaatggcaaggagtacaagtgcaaggtctccaacaaagccctctacgcccccgaagagaaaaccatctccaaagccaaagggcagccccgagagccacaggtgtacaccctgcccccatcccaggaggagatgaccaagaaccaggtcagcctggcgtgcctggtcaaaggcttctaccccagcgacatcgccgtggagtgggagagcaatgggcagccggagaacaactacaagaccacgcctcccgtgctggactccgacggctccttcttcctctacagcaggctaaccgtggacaagagcaggtggcaggaggggaatgtcttctcatgctccgtgatgcatgaggctctgcacaaccactacacacagaagagcctctccctgtctctgggtaaatga

SEQ ID NO: 230 - protein, 330 aa, Artificial Sequence
  Description of the artificial sequence: amino acid sequence of CD70_IgG1_AA_DE_P329Y_T366A CH
ASTKGPSVFPLAPSSKSTSGGTAALGCLVKDYFPEPVTVSWNSGALTSGVHTFPAVLQSSGLYSLSSVVTVPSSSLGTQTYICNVNHKPSNTKVDKKVEPKSCDKTHTAPPAPAPELLGGPDVFLFPPKPKDTLMISRTPEVTCVVVDVSHEDPEVKFNWYVDGVEVHNAKTKPREEQYNSTYRVVSVLTVLHQDWLNGKEYKCKVSNKALYAPEEKTISKAKGQPREPQVYTLPPSQEEMTKNQVSLACLVKGFYPSDIAVEWESNGQPENNYKTTPPVLDSDGSFFLYSRLTVDKSRWQEGNVFSCSVMHEALHNHYTQKSLSLSLGK

SEQ ID NO: 231 - DNA, 993 bp, Artificial Sequence
  Description of the artificial sequence: base sequence of CD70_IgG1_AA_DE_P329Y_L368A CH
gctagcaccaagggcccatcggtcttccccctggcaccctcctccaagagcacctctgggggcacagcggccctgggctgcctggtcaaggactacttccccgaaccggtgacggtgtcgtggaactcaggcgccctgaccagcggcgtgcacaccttcccggctgtcctacagtcctcaggactctactccctcagcagcgtggtgaccgtgccctccagcagcttgggcacccagacctacatctgcaacgtgaatcacaagcccagcaacaccaaggtggacaagaaagttgagcccaaatcttgtgacaaaactcacacagcgccaccggcgccagcacctgaactcctggggggaccggatgtcttcctcttccccccaaaacccaaggacaccctcatgatctcccggacccctgaggtcacatgcgtggtggtggacgtgagccacgaagaccctgaggtcaagttcaactggtacgtggacggcgtggaggtgcataatgccaagacaaagccgcgggaggagcagtacaacagcacgtaccgtgtggtcagcgtcctcaccgtcctgcaccaggactggctgaatggcaaggagtacaagtgcaaggtctccaacaaagccctctacgcccccgaagagaaaaccatctccaaagccaaagggcagccccgagagccacaggtgtacaccctgcccccatcccaggaggagatgaccaagaaccaggtcagcctgacctgcgcggtcaaaggcttctaccccagcgacatcgccgtggagtgggagagcaatgggcagccggagaacaactacaagaccacgcctcccgtgctggactccgacggctccttcttcctctacagcaggctaaccgtggacaagagcaggtggcaggaggggaatgtcttctcatgctccgtgatgcatgaggctctgcacaaccactacacacagaagagcctctccctgtctctgggtaaatga

SEQ ID NO: 232 - protein, 330 aa, Artificial Sequence
  Description of the artificial sequence: amino acid sequence of CD70_IgG1_AA_DE_P329Y_L368A CH
ASTKGPSVFPLAPSSKSTSGGTAALGCLVKDYFPEPVTVSWNSGALTSGVHTFPAVLQSSGLYSLSSVVTVPSSSLGTQTYICNVNHKPSNTKVDKKVEPKSCDKTHTAPPAPAPELLGGPDVFLFPPKPKDTLMISRTPEVTCVVVDVSHEDPEVKFNWYVDGVEVHNAKTKPREEQYNSTYRVVSVLTVLHQDWLNGKEYKCKVSNKALYAPEEKTISKAKGQPREPQVYTLPPSQEEMTKNQVSLTCAVKGFYPSDIAVEWESNGQPENNYKTTPPVLDSDGSFFLYSRLTVDKSRWQEGNVFSCSVMHEALHNHYTQKSLSLSLGK

SEQ ID NO: 233 - DNA, 993 bp, Artificial Sequence
  Description of the artificial sequence: base sequence of CD70_IgG1_AA_DE_P329Y_D399A CH
gctagcaccaagggcccatcggtcttccccctggcaccctcctccaagagcacctctgggggcacagcggccctgggctgcctggtcaaggactacttccccgaaccggtgacggtgtcgtggaactcaggcgccctgaccagcggcgtgcacaccttcccggctgtcctacagtcctcaggactctactccctcagcagcgtggtgaccgtgccctccagcagcttgggcacccagacctacatctgcaacgtgaatcacaagcccagcaacaccaaggtggacaagaaagttgagcccaaatcttgtgacaaaactcacacagcgccaccggcgccagcacctgaactcctggggggaccggatgtcttcctcttccccccaaaacccaaggacaccctcatgatctcccggacccctgaggtcacatgcgtggtggtggacgtgagccacgaagaccctgaggtcaagttcaactggtacgtggacggcgtggaggtgcataatgccaagacaaagccgcgggaggagcagtacaacagcacgtaccgtgtggtcagcgtcctcaccgtcctgcaccaggactggctgaatggcaaggagtacaagtgcaaggtctccaacaaagccctctacgcccccgaagagaaaaccatctccaaagccaaagggcagccccgagagccacaggtgtacaccctgcccccatcccaggaggagatgaccaagaaccaggtcagcctgacctgcctggtcaaaggcttctaccccagcgacatcgccgtggagtgggagagcaatgggcagccggagaacaactacaagaccacgcctcccgtgctggcgtccgacggctccttcttcctctacagcaggctaaccgtggacaagagcaggtggcaggaggggaatgtcttctcatgctccgtgatgcatgaggctctgcacaaccactacacacagaagagcctctccctgtctctgggtaaatga

SEQ ID NO: 234 - protein, 330 aa, Artificial Sequence
  Description of the artificial sequence: amino acid sequence of CD70_IgG1_AA_DE_P329Y_D399A CH
ASTKGPSVFPLAPSSKSTSGGTAALGCLVKDYFPEPVTVSWNSGALTSGVHTFPAVLQSSGLYSLSSVVTVPSSSLGTQTYICNVNHKPSNTKVDKKVEPKSCDKTHTAPPAPAPELLGGPDVFLFPPKPKDTLMISRTPEVTCVVVDVSHEDPEVKFNWYVDGVEVHNAKTKPREEQYNSTYRVVSVLTVLHQDWLNGKEYKCKVSNKALYAPEEKTISKAKGQPREPQVYTLPPSQEEMTKNQVSLTCLVKGFYPSDIAVEWESNGQPENNYKTTPPVLASDGSFFLYSRLTVDKSRWQEGNVFSCSVMHEALHNHYTQKSLSLSLGK

SEQ ID NO: 235 - DNA, 993 bp, Artificial Sequence
  Description of the artificial sequence: base sequence of CD70_IgG1_AA_DE_P329Y_F405A CH
gctagcaccaagggcccatcggtcttccccctggcaccctcctccaagagcacctctgggggcacagcggccctgggctgcctggtcaaggactacttccccgaaccggtgacggtgtcgtggaactcaggcgccctgaccagcggcgtgcacaccttcccggctgtcctacagtcctcaggactctactccctcagcagcgtggtgaccgtgccctccagcagcttgggcacccagacctacatctgcaacgtgaatcacaagcccagcaacaccaaggtggacaagaaagttgagcccaaatcttgtgacaaaactcacacagcgccaccggcgccagcacctgaactcctggggggaccggatgtcttcctcttccccccaaaacccaaggacaccctcatgatctcccggacccctgaggtcacatgcgtggtggtggacgtgagccacgaagaccctgaggtcaagttcaactggtacgtggacggcgtggaggtgcataatgccaagacaaagccgcgggaggagcagtacaacagcacgtaccgtgtggtcagcgtcctcaccgtcctgcaccaggactggctgaatggcaaggagtacaagtgcaaggtctccaacaaagccctctacgcccccgaagagaaaaccatctccaaagccaaagggcagccccgagagccacaggtgtacaccctgcccccatcccaggaggagatgaccaagaaccaggtcagcctgacctgcctggtcaaaggcttctaccccagcgacatcgccgtggagtgggagagcaatgggcagccggagaacaactacaagaccacgcctcccgtgctggactccgacggctccttcgcgctctacagcaggctaaccgtggacaagagcaggtggcaggaggggaatgtcttctcatgctccgtgatgcatgaggctctgcacaaccactacacacagaagagcctctccctgtctctgggtaaatga

SEQ ID NO: 236 - protein, 330 aa, Artificial Sequence
  Description of the artificial sequence: amino acid sequence of CD70_IgG1_AA_DE_P329Y_F405A CH
ASTKGPSVFPLAPSSKSTSGGTAALGCLVKDYFPEPVTVSWNSGALTSGVHTFPAVLQSSGLYSLSSVVTVPSSSLGTQTYICNVNHKPSNTKVDKKVEPKSCDKTHTAPPAPAPELLGGPDVFLFPPKPKDTLMISRTPEVTCVVVDVSHEDPEVKFNWYVDGVEVHNAKTKPREEQYNSTYRVVSVLTVLHQDWLNGKEYKCKVSNKALYAPEEKTISKAKGQPREPQVYTLPPSQEEMTKNQVSLTCLVKGFYPSDIAVEWESNGQPENNYKTTPPVLDSDGSFALYSRLTVDKSRWQEGNVFSCSVMHEALHNHYTQKSLSLSLGK

SEQ ID NO: 237 - DNA, 993 bp, Artificial Sequence
  Description of the artificial sequence: base sequence of CD70_IgG1_AA_DE_P329Y_Y407A CH
gctagcaccaagggcccatcggtcttccccctggcaccctcctccaagagcacctctgggggcacagcggccctgggctgcctggtcaaggactacttccccgaaccggtgacggtgtcgtggaactcaggcgccctgaccagcggcgtgcacaccttcccggctgtcctacagtcctcaggactctactccctcagcagcgtggtgaccgtgccctccagcagcttgggcacccagacctacatctgcaacgtgaatcacaagcccagcaacaccaaggtggacaagaaagttgagcccaaatcttgtgacaaaactcacacagcgccaccggcgccagcacctgaactcctggggggaccggatgtcttcctcttccccccaaaacccaaggacaccctcatgatctcccggacccctgaggtcacatgcgtggtggtggacgtgagccacgaagaccctgaggtcaagttcaactggtacgtggacggcgtggaggtgcataatgccaagacaaagccgcgggaggagcagtacaacagcacgtaccgtgtggtcagcgtcctcaccgtcctgcaccaggactggctgaatggcaaggagtacaagtgcaaggtctccaacaaagccctctacgcccccgaagagaaaaccatctccaaagccaaagggcagccccgagagccacaggtgtacaccctgcccccatcccaggaggagatgaccaagaaccaggtcagcctgacctgcctggtcaaaggcttctaccccagcgacatcgccgtggagtgggagagcaatgggcagccggagaacaactacaagaccacgcctcccgtgctggactccgacggctccttcttcctcgcgagcaggctaaccgtggacaagagcaggtggcaggaggggaatgtcttctcatgctccgtgatgcatgaggctctgcacaaccactacacacagaagagcctctccctgtctctgggtaaatga

SEQ ID NO: 238 - protein, 330 aa, Artificial Sequence
  Description of the artificial sequence: amino acid sequence of CD70_IgG1_AA_DE_P329Y_Y407A CH
ASTKGPSVFPLAPSSKSTSGGTAALGCLVKDYFPEPVTVSWNSGALTSGVHTFPAVLQSSGLYSLSSVVTVPSSSLGTQTYICNVNHKPSNTKVDKKVEPKSCDKTHTAPPAPAPELLGGPDVFLFPPKPKDTLMISRTPEVTCVVVDVSHEDPEVKFNWYVDGVEVHNAKTKPREEQYNSTYRVVSVLTVLHQDWLNGKEYKCKVSNKALYAPEEKTISKAKGQPREPQVYTLPPSQEEMTKNQVSLTCLVKGFYPSDIAVEWESNGQPENNYKTTPPVLDSDGSFFLASRLTVDKSRWQEGNVFSCSVMHEALHNHYTQKSLSLSLGK

SEQ ID NO: 239 - DNA, 993 bp, Artificial Sequence
  Description of the artificial sequence: base sequence of CD70_IgG1_AA_DE_P329Y_K409A CH
gctagcaccaagggcccatcggtcttccccctggcaccctcctccaagagcacctctgggggcacagcggccctgggctgcctggtcaaggactacttccccgaaccggtgacggtgtcgtggaactcaggcgccctgaccagcggcgtgcacaccttcccggctgtcctacagtcctcaggactctactccctcagcagcgtggtgaccgtgccctccagcagcttgggcacccagacctacatctgcaacgtgaatcacaagcccagcaacaccaaggtggacaagaaagttgagcccaaatcttgtgacaaaactcacacagcgccaccggcgccagcacctgaactcctggggggaccggatgtcttcctcttccccccaaaacccaaggacaccctcatgatctcccggacccctgaggtcacatgcgtggtggtggacgtgagccacgaagaccctgaggtcaagttcaactggtacgtggacggcgtggaggtgcataatgccaagacaaagccgcgggaggagcagtacaacagcacgtaccgtgtggtcagcgtcctcaccgtcctgcaccaggactggctgaatggcaaggagtacaagtgcaaggtctccaacaaagccctctacgcccccgaagagaaaaccatctccaaagccaaagggcagccccgagagccacaggtgtacaccctgcccccatcccaggaggagatgaccaagaaccaggtcagcctgacctgcctggtcaaaggcttctaccccagcgacatcgccgtggagtgggagagcaatgggcagccggagaacaactacaagaccacgcctcccgtgctggactccgacggctccttcttcctctacagcgcgctaaccgtggacaagagcaggtggcaggaggggaatgtcttctcatgctccgtgatgcatgaggctctgcacaaccactacacacagaagagcctctccctgtctctgggtaaatga

SEQ ID NO: 240 - protein, 330 aa, Artificial Sequence
  Description of the artificial sequence: amino acid sequence of CD70_IgG1_AA_DE_P329Y_K409A CH
ASTKGPSVFPLAPSSKSTSGGTAALGCLVKDYFPEPVTVSWNSGALTSGVHTFPAVLQSSGLYSLSSVVTVPSSSLGTQTYICNVNHKPSNTKVDKKVEPKSCDKTHTAPPAPAPELLGGPDVFLFPPKPKDTLMISRTPEVTCVVVDVSHEDPEVKFNWYVDGVEVHNAKTKPREEQYNSTYRVVSVLTVLHQDWLNGKEYKCKVSNKALYAPEEKTISKAKGQPREPQVYTLPPSQEEMTKNQVSLTCLVKGFYPSDIAVEWESNGQPENNYKTTPPVLDSDGSFFLYSALTVDKSRWQEGNVFSCSVMHEALHNHYTQKSLSLSLGK

SEQ ID NO: 241 - DNA, 357 bp, Artificial Sequence
  Description of the artificial sequence: base sequence of DNP VH
caggttcagctggtgcagtctggagctgaggtgaagaagcctggggcctcagtgaaggtctcctgcaaggcttctggttacacctttaccagctatggtatcagctgggtgcgacaggcccctggacaagggcttgagtggatgggatggatcagcgcttacaatggtaacacaaactatgcacagaagctccagggcagagtcaccatgaccacagacacatccacgagcacagcctacatggagctgaggagcctgagatctgacgacacggccgtgtattactgtgcgagatgggatagcagcagctggtcctttgactactggggccagggaaccctggtcaccgtctcctca

SEQ ID NO: 242 - protein, 119 aa, Artificial Sequence
  Description of the artificial sequence: amino acid sequence of DNP VH
QVQLVQSGAEVKKPGASVKVSCKASGYTFTSYGISWVRQAPGQGLEWMGWISAYNGNTNYAQKLQGRVTMTTDTSTSTAYMELRSLRSDDTAVYYCARWDSSSWSFDYWGQGTLVTVSS

SEQ ID NO: 243 - DNA, 321 bp, Artificial Sequence
  Description of the artificial sequence: base sequence of DNP VL
gacatccagatgacccagtctccatcctcactgtctgcatctgtaggagacagagtcaccatcacttgtcgggcgagtcagggtattagcagctggttagcctggtatcagcagaaaccagagaaagcccctaagtccctgatctatgctgcatccagtttgcaaagtggggtcccatcaaggttcagcggcagtggatctgggacagatttcactctcaccatcagcagcctgcagcctgaagattttgcaacttattactgccaacagtataatagttacccgtacacttttggccaggggaccaagctggagatcaaa

SEQ ID NO: 244 - protein, 107 aa, Artificial Sequence
  Description of the artificial sequence: amino acid sequence of DNP VL
DIQMTQSPSSLSASVGDRVTITCRASQGISSWLAWYQQKPEKAPKSLIYAASSLQSGVPSRFSGSGSGTDFTLTISSLQPEDFATYYCQQYNSYPYTFGQGTKLEIK

SEQ ID NO: 245 - DNA, 993 bp, Artificial Sequence
  Description of the artificial sequence: base sequence of IgG1_AA_AAA/S239D_D265A_K409R CH
gctagcaccaagggcccatcggtcttccccctggcaccctcctccaagagcacctctgggggcacagcggccctgggctgcctggtcaaggactacttccccgaaccggtgacggtgtcgtggaactcaggcgccctgaccagcggcgtgcacaccttcccggctgtcctacagtcctcaggactctactccctcagcagcgtggtgaccgtgccctccagcagcttgggcacccagacctacatctgcaacgtgaatcacaagcccagcaacaccaaggtggacaagaaagttgagcccaaatcttgtgacaaaactcacacagcgccaccggcgccagcacctgaactcctggggggaccggatgtcttcctcttccccccaaaacccaaggacaccctcatgatctcccggacccctgaggtcacatgcgtggtggtggccgtgagccacgaagaccctgaggtcaagttcaactggtacgtggacggcgtggaggtgcataatgccaagacaaagccgcgggaggagcagtacaacgccacgtaccgtgtggtcagcgtcctcaccgtcctgcaccaggactggctgaatggcaaggagtacaagtgcaaggtctccaacaaagccctcccagcccccatcgcggcaaccatctccaaagccaaagggcagccccgagaaccacaggtgtacaccctgcccccatcccgggatgagctgaccaagaaccaggtcagcctgacctgcctggtcaaaggcttctatcccagcgacatcgccgtggagtgggagagcaatgggcagccggagaacaactacaagaccacgcctcccgtgctggactccgacggctccttcttcctctacagccggctcaccgtggacaagagcaggtggcagcaggggaacgtcttctcatgctccgtgatgcatgaggctctgcacaaccactacacgcagaagagcctctccctgtctccgggtaaatga

SEQ ID NO: 246 - protein, 330 aa, Artificial Sequence
  Description of the artificial sequence: amino acid sequence of IgG1_AA_AAA/S239D_D265A_K409R CH
ASTKGPSVFPLAPSSKSTSGGTAALGCLVKDYFPEPVTVSWNSGALTSGVHTFPAVLQSSGLYSLSSVVTVPSSSLGTQTYICNVNHKPSNTKVDKKVEPKSCDKTHTAPPAPAPELLGGPDVFLFPPKPKDTLMISRTPEVTCVVVAVSHEDPEVKFNWYVDGVEVHNAKTKPREEQYNATYRVVSVLTVLHQDWLNGKEYKCKVSNKALPAPIAATISKAKGQPREPQVYTLPPSRDELTKNQVSLTCLVKGFYPSDIAVEWESNGQPENNYKTTPPVLDSDGSFFLYSRLTVDKSRWQQGNVFSCSVMHEALHNHYTQKSLSLSPGK

SEQ ID NO: 247 - DNA, 993 bp, Artificial Sequence
  Description of the artificial sequence: base sequence of IgG1_AA_S239D/K326T_D265A_K409R CH
gctagcaccaagggcccatcggtcttccccctggcaccctcctccaagagcacctctgggggcacagcggccctgggctgcctggtcaaggactacttccccgaaccggtgacggtgtcgtggaactcaggcgccctgaccagcggcgtgcacaccttcccggctgtcctacagtcctcaggactctactccctcagcagcgtggtgaccgtgccctccagcagcttgggcacccagacctacatctgcaacgtgaatcacaagcccagcaacaccaaggtggacaagaaagttgagcccaaatcttgtgacaaaactcacacagcgccaccggcgccagcacctgaactcctggggggaccggatgtcttcctcttccccccaaaacccaaggacaccctcatgatctcccggacccctgaggtcacatgcgtggtggtggccgtgagccacgaagaccctgaggtcaagttcaactggtacgtggacggcgtggaggtgcataatgccaagacaaagccgcgggaggagcagtacaacagcacgtaccgtgtggtcagcgtcctcaccgtcctgcaccaggactggctgaatggcaaggagtacaagtgcaaggtctccaacacagccctcccagcccccatcgagaaaaccatctccaaagccaaagggcagccccgagaaccacaggtgtacaccctgcccccatcccgggatgagctgaccaagaaccaggtcagcctgacctgcctggtcaaaggcttctatcccagcgacatcgccgtggagtgggagagcaatgggcagccggagaacaactacaagaccacgcctcccgtgctggactccgacggctccttcttcctctacagccggctcaccgtggacaagagcaggtggcagcaggggaacgtcttctcatgctccgtgatgcatgaggctctgcacaaccactacacgcagaagagcctctccctgtctccgggtaaatga

SEQ ID NO: 248 - protein, 330 aa, Artificial Sequence
  Description of the artificial sequence: amino acid sequence of IgG1_AA_S239D/K326T_D265A_K409R CH
ASTKGPSVFPLAPSSKSTSGGTAALGCLVKDYFPEPVTVSWNSGALTSGVHTFPAVLQSSGLYSLSSVVTVPSSSLGTQTYICNVNHKPSNTKVDKKVEPKSCDKTHTAPPAPAPELLGGPDVFLFPPKPKDTLMISRTPEVTCVVVAVSHEDPEVKFNWYVDGVEVHNAKTKPREEQYNSTYRVVSVLTVLHQDWLNGKEYKCKVSNTALPAPIEKTISKAKGQPREPQVYTLPPSRDELTKNQVSLTCLVKGFYPSDIAVEWESNGQPENNYKTTPPVLDSDGSFFLYSRLTVDKSRWQQGNVFSCSVMHEALHNHYTQKSLSLSPGK

SEQ ID NO: 249 - DNA, 993 bp, Artificial Sequence
  Description of the artificial sequence: base sequence of IgG1_AA_AAA/S239D_P329Y_K409R CH
gctagcaccaagggcccatcggtcttccccctggcaccctcctccaagagcacctctgggggcacagcggccctgggctgcctggtcaaggactacttccccgaaccggtgacggtgtcgtggaactcaggcgccctgaccagcggcgtgcacaccttcccggctgtcctacagtcctcaggactctactccctcagcagcgtggtgaccgtgccctccagcagcttgggcacccagacctacatctgcaacgtgaatcacaagcccagcaacaccaaggtggacaagaaagttgagcccaaatcttgtgacaaaactcacacagcgccaccggcgccagcacctgaactcctggggggaccggatgtcttcctcttccccccaaaacccaaggacaccctcatgatctcccggacccctgaggtcacatgcgtggtggtggacgtgagccacgaagaccctgaggtcaagttcaactggtacgtggacggcgtggaggtgcataatgccaagacaaagccgcgggaggagcagtacaacgccacgtaccgtgtggtcagcgtcctcaccgtcctgcaccaggactggctgaatggcaaggagtacaagtgcaaggtctccaacaaagccctctacgcccccatcgcggcaaccatctccaaagccaaagggcagccccgagaaccacaggtgtacaccctgcccccatcccgggatgagctgaccaagaaccaggtcagcctgacctgcctggtcaaaggcttctatcccagcgacatcgccgtggagtgggagagcaatgggcagccggagaacaactacaagaccacgcctcccgtgctggactccgacggctccttcttcctctacagccggctcaccgtggacaagagcaggtggcagcaggggaacgtcttctcatgctccgtgatgcatgaggctctgcacaaccactacacgcagaagagcctctccctgtctccgggtaaatga

SEQ ID NO: 250 - protein, 330 aa, Artificial Sequence
  Description of the artificial sequence: amino acid sequence of IgG1_AA_AAA/S239D_P329Y_K409R CH
ASTKGPSVFPLAPSSKSTSGGTAALGCLVKDYFPEPVTVSWNSGALTSGVHTFPAVLQSSGLYSLSSVVTVPSSSLGTQTYICNVNHKPSNTKVDKKVEPKSCDKTHTAPPAPAPELLGGPDVFLFPPKPKDTLMISRTPEVTCVVVDVSHEDPEVKFNWYVDGVEVHNAKTKPREEQYNATYRVVSVLTVLHQDWLNGKEYKCKVSNKALYAPIAATISKAKGQPREPQVYTLPPSRDELTKNQVSLTCLVKGFYPSDIAVEWESNGQPENNYKTTPPVLDSDGSFFLYSRLTVDKSRWQQGNVFSCSVMHEALHNHYTQKSLSLSPGK

SEQ ID NO: 251 - DNA, 993 bp, Artificial Sequence
  Description of the artificial sequence: base sequence of IgG1_AA_S239D/K326T_P329Y_K409R CH
gctagcaccaagggcccatcggtcttccccctggcaccctcctccaagagcacctctgggggcacagcggccctgggctgcctggtcaaggactacttccccgaaccggtgacggtgtcgtggaactcaggcgccctgaccagcggcgtgcacaccttcccggctgtcctacagtcctcaggactctactccctcagcagcgtggtgaccgtgccctccagcagcttgggcacccagacctacatctgcaacgtgaatcacaagcccagcaacaccaaggtggacaagaaagttgagcccaaatcttgtgacaaaactcacacagcgccaccggcgccagcacctgaactcctggggggaccggatgtcttcctcttccccccaaaacccaaggacaccctcatgatctcccggacccctgaggtcacatgcgtggtggtggacgtgagccacgaagaccctgaggtcaagttcaactggtacgtggacggcgtggaggtgcataatgccaagacaaagccgcgggaggagcagtacaacagcacgtaccgtgtggtcagcgtcctcaccgtcctgcaccaggactggctgaatggcaaggagtacaagtgcaaggtctccaacacagccctctacgcccccatcgagaaaaccatctccaaagccaaagggcagccccgagaaccacaggtgtacaccctgcccccatcccgggatgagctgaccaagaaccaggtcagcctgacctgcctggtcaaaggcttctatcccagcgacatcgccgtggagtgggagagcaatgggcagccggagaacaactacaagaccacgcctcccgtgctggactccgacggctccttcttcctctacagccggctcaccgtggacaagagcaggtggcagcaggggaacgtcttctcatgctccgtgatgcatgaggctctgcacaaccactacacgcagaagagcctctccctgtctccgggtaaatga

SEQ ID NO: 252 - protein, 330 aa, Artificial Sequence
  Description of the artificial sequence: amino acid sequence of IgG1_AA_S239D/K326T_P329Y_K409R CH
ASTKGPSVFPLAPSSKSTSGGTAALGCLVKDYFPEPVTVSWNSGALTSGVHTFPAVLQSSGLYSLSSVVTVPSSSLGTQTYICNVNHKPSNTKVDKKVEPKSCDKTHTAPPAPAPELLGGPDVFLFPPKPKDTLMISRTPEVTCVVVDVSHEDPEVKFNWYVDGVEVHNAKTKPREEQYNSTYRVVSVLTVLHQDWLNGKEYKCKVSNTALYAPIEKTISKAKGQPREPQVYTLPPSRDELTKNQVSLTCLVKGFYPSDIAVEWESNGQPENNYKTTPPVLDSDGSFFLYSRLTVDKSRWQQGNVFSCSVMHEALHNHYTQKSLSLSPGK

SEQ ID NO: 253 - DNA, 993 bp, Artificial Sequence
  Description of the artificial sequence: base sequence of IgG1_AA_S239D/K326E_D265A_K409R CH
gctagcaccaagggcccatcggtcttccccctggcaccctcctccaagagcacctctgggggcacagcggccctgggctgcctggtcaaggactacttccccgaaccggtgacggtgtcgtggaactcaggcgccctgaccagcggcgtgcacaccttcccggctgtcctacagtcctcaggactctactccctcagcagcgtggtgaccgtgccctccagcagcttgggcacccagacctacatctgcaacgtgaatcacaagcccagcaacaccaaggtggacaagaaagttgagcccaaatcttgtgacaaaactcacacagcgccaccggcgccagcacctgaactcctggggggaccggatgtcttcctcttccccccaaaacccaaggacaccctcatgatctcccggacccctgaggtcacatgcgtggtggtggccgtgagccacgaagaccctgaggtcaagttcaactggtacgtggacggcgtggaggtgcataatgccaagacaaagccgcgggaggagcagtacaacagcacgtaccgtgtggtcagcgtcctcaccgtcctgcaccaggactggctgaatggcaaggagtacaagtgcaaggtctccaacgaagccctcccagcccccatcgagaaaaccatctccaaagccaaagggcagccccgagaaccacaggtgtacaccctgcccccatcccgggatgagctgaccaagaaccaggtcagcctgacctgcctggtcaaaggcttctatcccagcgacatcgccgtggagtgggagagcaatgggcagccggagaacaactacaagaccacgcctcccgtgctggactccgacggctccttcttcctctacagccggctcaccgtggacaagagcaggtggcagcaggggaacgtcttctcatgctccgtgatgcatgaggctctgcacaaccactacacgcagaagagcctctccctgtctccgggtaaatga

SEQ ID NO: 254 - protein, 330 aa, Artificial Sequence
  Description of the artificial sequence: amino acid sequence of IgG1_AA_S239D/K326E_D265A_K409R CH
ASTKGPSVFPLAPSSKSTSGGTAALGCLVKDYFPEPVTVSWNSGALTSGVHTFPAVLQSSGLYSLSSVVTVPSSSLGTQTYICNVNHKPSNTKVDKKVEPKSCDKTHTAPPAPAPELLGGPDVFLFPPKPKDTLMISRTPEVTCVVVAVSHEDPEVKFNWYVDGVEVHNAKTKPREEQYNSTYRVVSVLTVLHQDWLNGKEYKCKVSNEALPAPIEKTISKAKGQPREPQVYTLPPSRDELTKNQVSLTCLVKGFYPSDIAVEWESNGQPENNYKTTPPVLDSDGSFFLYSRLTVDKSRWQQGNVFSCSVMHEALHNHYTQKSLSLSPGK

SEQ ID NO: 255 - DNA, 993 bp, Artificial Sequence
  Description of the artificial sequence: base sequence of IgG1_AA_S239D/K326I_D265A_K409R CH
gctagcaccaagggcccatcggtcttccccctggcaccctcctccaagagcacctctgggggcacagcggccctgggctgcctggtcaaggactacttccccgaaccggtgacggtgtcgtggaactcaggcgccctgaccagcggcgtgcacaccttcccggctgtcctacagtcctcaggactctactccctcagcagcgtggtgaccgtgccctccagcagcttgggcacccagacctacatctgcaacgtgaatcacaagcccagcaacaccaaggtggacaagaaagttgagcccaaatcttgtgacaaaactcacacagcgccaccggcgccagcacctgaactcctggggggaccggatgtcttcctcttccccccaaaacccaaggacaccctcatgatctcccggacccctgaggtcacatgcgtggtggtggccgtgagccacgaagaccctgaggtcaagttcaactggtacgtggacggcgtggaggtgcataatgccaagacaaagccgcgggaggagcagtacaacagcacgtaccgtgtggtcagcgtcctcaccgtcctgcaccaggactggctgaatggcaaggagtacaagtgcaaggtctccaacatagccctcccagcccccatcgagaaaaccatctccaaagccaaagggcagccccgagaaccacaggtgtacaccctgcccccatcccgggatgagctgaccaagaaccaggtcagcctgacctgcctggtcaaaggcttctatcccagcgacatcgccgtggagtgggagagcaatgggcagccggagaacaactacaagaccacgcctcccgtgctggactccgacggctccttcttcctctacagccggctcaccgtggacaagagcaggtggcagcaggggaacgtcttctcatgctccgtgatgcatgaggctctgcacaaccactacacgcagaagagcctctccctgtctccgggtaaatga

SEQ ID NO: 256 - protein, 330 aa, Artificial Sequence
  Description of the artificial sequence: amino acid sequence of IgG1_AA_S239D/K326I_D265A_K409R CH
ASTKGPSVFPLAPSSKSTSGGTAALGCLVKDYFPEPVTVSWNSGALTSGVHTFPAVLQSSGLYSLSSVVTVPSSSLGTQTYICNVNHKPSNTKVDKKVEPKSCDKTHTAPPAPAPELLGGPDVFLFPPKPKDTLMISRTPEVTCVVVAVSHEDPEVKFNWYVDGVEVHNAKTKPREEQYNSTYRVVSVLTVLHQDWLNGKEYKCKVSNIALPAPIEKTISKAKGQPREPQVYTLPPSRDELTKNQVSLTCLVKGFYPSDIAVEWESNGQPENNYKTTPPVLDSDGSFFLYSRLTVDKSRWQQGNVFSCSVMHEALHNHYTQKSLSLSPGK

SEQ ID NO: 257 - DNA, 993 bp, Artificial Sequence
  Description of the artificial sequence: base sequence of IgG1_AA_AAA/H268E_D265A_K409R CH
gctagcaccaagggcccatcggtcttccccctggcaccctcctccaagagcacctctgggggcacagcggccctgggctgcctggtcaaggactacttccccgaaccggtgacggtgtcgtggaactcaggcgccctgaccagcggcgtgcacaccttcccggctgtcctacagtcctcaggactctactccctcagcagcgtggtgaccgtgccctccagcagcttgggcacccagacctacatctgcaacgtgaatcacaagcccagcaacaccaaggtggacaagaaagttgagcccaaatcttgtgacaaaactcacacagcgccaccggcgccagcacctgaactcctggggggaccgtcagtcttcctcttccccccaaaacccaaggacaccctcatgatctcccggacccctgaggtcacatgcgtggtggtggccgtgagcgaggaagaccctgaggtcaagttcaactggtacgtggacggcgtggaggtgcataatgccaagacaaagccgcgggaggagcagtacaacgccacgtaccgtgtggtcagcgtcctcaccgtcctgcaccaggactggctgaatggcaaggagtacaagtgcaaggtctccaacaaagccctcccagcccccatcgcggcaaccatctccaaagccaaagggcagccccgagaaccacaggtgtacaccctgcccccatcccgggatgagctgaccaagaaccaggtcagcctgacctgcctggtcaaaggcttctatcccagcgacatcgccgtggagtgggagagcaatgggcagccggagaacaactacaagaccacgcctcccgtgctggactccgacggctccttcttcctctacagccggctcaccgtggacaagagcaggtggcagcaggggaacgtcttctcatgctccgtgatgcatgaggctctgcacaaccactacacgcagaagagcctctccctgtctccgggtaaatga

SEQ ID NO: 258 - protein, 330 aa, Artificial Sequence
  Description of the artificial sequence: amino acid sequence of IgG1_AA_AAA/H268E_D265A_K409R CH
ASTKGPSVFPLAPSSKSTSGGTAALGCLVKDYFPEPVTVSWNSGALTSGVHTFPAVLQSSGLYSLSSVVTVPSSSLGTQTYICNVNHKPSNTKVDKKVEPKSCDKTHTAPPAPAPELLGGPSVFLFPPKPKDTLMISRTPEVTCVVVAVSEEDPEVKFNWYVDGVEVHNAKTKPREEQYNATYRVVSVLTVLHQDWLNGKEYKCKVSNKALPAPIAATISKAKGQPREPQVYTLPPSRDELTKNQVSLTCLVKGFYPSDIAVEWESNGQPENNYKTTPPVLDSDGSFFLYSRLTVDKSRWQQGNVFSCSVMHEALHNHYTQKSLSLSPGK

SEQ ID NO: 259 - DNA, 993 bp, Artificial Sequence
  Description of the artificial sequence: base sequence of IgG1_AA_S298A/E333A/K334E_D265A_K409R CH
gctagcaccaagggcccatcggtcttccccctggcaccctcctccaagagcacctctgggggcacagcggccctgggctgcctggtcaaggactacttccccgaaccggtgacggtgtcgtggaactcaggcgccctgaccagcggcgtgcacaccttcccggctgtcctacagtcctcaggactctactccctcagcagcgtggtgaccgtgccctccagcagcttgggcacccagacctacatctgcaacgtgaatcacaagcccagcaacaccaaggtggacaagaaagttgagcccaaatcttgtgacaaaactcacacagcgccaccggcgccagcacctgaactcctggggggaccgtcagtcttcctcttccccccaaaacccaaggacaccctcatgatctcccggacccctgaggtcacatgcgtggtggtggccgtgagccacgaagaccctgaggtcaagttcaactggtacgtggacggcgtggaggtgcataatgccaagacaaagccgcgggaggagcagtacaacgccacgtaccgtgtggtcagcgtcctcaccgtcctgcaccaggactggctgaatggcaaggagtacaagtgcaaggtctccaacaaagccctcccagcccccatcgcggaaaccatctccaaagccaaagggcagccccgagaaccacaggtgtacaccctgcccccatcccgggatgagctgaccaagaaccaggtcagcctgacctgcctggtcaaaggcttctatcccagcgacatcgccgtggagtgggagagcaatgggcagccggagaacaactacaagaccacgcctcccgtgctggactccgacggctccttcttcctctacagccggctcaccgtggacaagagcaggtggcagcaggggaacgtcttctcatgctccgtgatgcatgaggctctgcacaaccactacacgcagaagagcctctccctgtctccgggtaaatga

SEQ ID NO: 260 - protein, 330 aa, Artificial Sequence
  Description of the artificial sequence: amino acid sequence of IgG1_AA_S298A/E333A/K334E_D265A_K409R CH
ASTKGPSVFPLAPSSKSTSGGTAALGCLVKDYFPEPVTVSWNSGALTSGVHTFPAVLQSSGLYSLSSVVTVPSSSLGTQTYICNVNHKPSNTKVDKKVEPKSCDKTHTAPPAPAPELLGGPSVFLFPPKPKDTLMISRTPEVTCVVVAVSHEDPEVKFNWYVDGVEVHNAKTKPREEQYNATYRVVSVLTVLHQDWLNGKEYKCKVSNKALPAPIAETISKAKGQPREPQVYTLPPSRDELTKNQVSLTCLVKGFYPSDIAVEWESNGQPENNYKTTPPVLDSDGSFFLYSRLTVDKSRWQQGNVFSCSVMHEALHNHYTQKSLSLSPGK

SEQ ID NO: 261 - DNA, 993 bp, Artificial Sequence
  Description of the artificial sequence: base sequence of IgG1_AA_S239E/I332E_D265A_K409R CH
gctagcaccaagggcccatcggtcttccccctggcaccctcctccaagagcacctctgggggcacagcggccctgggctgcctggtcaaggactacttccccgaaccggtgacggtgtcgtggaactcaggcgccctgaccagcggcgtgcacaccttcccggctgtcctacagtcctcaggactctactccctcagcagcgtggtgaccgtgccctccagcagcttgggcacccagacctacatctgcaacgtgaatcacaagcccagcaacaccaaggtggacaagaaagttgagcccaaatcttgtgacaaaactcacacagcgccaccggcgccagcacctgaactcctggggggaccggaagtcttcctcttccccccaaaacccaaggacaccctcatgatctcccggacccctgaggtcacatgcgtggtggtggccgtgagccacgaagaccctgaggtcaagttcaactggtacgtggacggcgtggaggtgcataatgccaagacaaagccgcgggaggagcagtacaacagcacgtaccgtgtggtcagcgtcctcaccgtcctgcaccaggactggctgaatggcaaggagtacaagtgcaaggtctccaacaaagccctcccagcccccgaagagaaaaccatctccaaagccaaagggcagccccgagaaccacaggtgtacaccctgcccccatcccgggatgagctgaccaagaaccaggtcagcctgacctgcctggtcaaaggcttctatcccagcgacatcgccgtggagtgggagagcaatgggcagccggagaacaactacaagaccacgcctcccgtgctggactccgacggctccttcttcctctacagccggctcaccgtggacaagagcaggtggcagcaggggaacgtcttctcatgctccgtgatgcatgaggctctgcacaaccactacacgcagaagagcctctccctgtctccgggtaaatga

SEQ ID NO: 262 - protein, 330 aa, Artificial Sequence
  Description of the artificial sequence: amino acid sequence of IgG1_AA_S239E/I332E_D265A_K409R CH
ASTKGPSVFPLAPSSKSTSGGTAALGCLVKDYFPEPVTVSWNSGALTSGVHTFPAVLQSSGLYSLSSVVTVPSSSLGTQTYICNVNHKPSNTKVDKKVEPKSCDKTHTAPPAPAPELLGGPEVFLFPPKPKDTLMISRTPEVTCVVVAVSHEDPEVKFNWYVDGVEVHNAKTKPREEQYNSTYRVVSVLTVLHQDWLNGKEYKCKVSNKALPAPEEKTISKAKGQPREPQVYTLPPSRDELTKNQVSLTCLVKGFYPSDIAVEWESNGQPENNYKTTPPVLDSDGSFFLYSRLTVDKSRWQQGNVFSCSVMHEALHNHYTQKSLSLSPGK

SEQ ID NO: 263 - DNA, 993 bp, Artificial Sequence
  Description of the artificial sequence: base sequence of IgG1_AA_S239D/I332T_D265A_K409R CH
gctagcaccaagggcccatcggtcttccccctggcaccctcctccaagagcacctctgggggcacagcggccctgggctgcctggtcaaggactacttccccgaaccggtgacggtgtcgtggaactcaggcgccctgaccagcggcgtgcacaccttcccggctgtcctacagtcctcaggactctactccctcagcagcgtggtgaccgtgccctccagcagcttgggcacccagacctacatctgcaacgtgaatcacaagcccagcaacaccaaggtggacaagaaagttgagcccaaatcttgtgacaaaactcacacagcgccaccggcgccagcacctgaactcctggggggaccggatgtcttcctcttccccccaaaacccaaggacaccctcatgatctcccggacccctgaggtcacatgcgtggtggtggccgtgagccacgaagaccctgaggtcaagttcaactggtacgtggacggcgtggaggtgcataatgccaagacaaagccgcgggaggagcagtacaacagcacgtaccgtgtggtcagcgtcctcaccgtcctgcaccaggactggctgaatggcaaggagtacaagtgcaaggtctccaacaaagccctcccagcccccactgagaaaaccatctccaaagccaaagggcagccccgagaaccacaggtgtacaccctgcccccatcccgggatgagctgaccaagaaccaggtcagcctgacctgcctggtcaaaggcttctatcccagcgacatcgccgtggagtgggagagcaatgggcagccggagaacaactacaagaccacgcctcccgtgctggactccgacggctccttcttcctctacagccggctcaccgtggacaagagcaggtggcagcaggggaacgtcttctcatgctccgtgatgcatgaggctctgcacaaccactacacgcagaagagcctctccctgtctccgggtaaatga

SEQ ID NO: 264 - protein, 330 aa, Artificial Sequence
  Description of the artificial sequence: amino acid sequence of IgG1_AA_S239D/I332T_D265A_K409R CH
ASTKGPSVFPLAPSSKSTSGGTAALGCLVKDYFPEPVTVSWNSGALTSGVHTFPAVLQSSGLYSLSSVVTVPSSSLGTQTYICNVNHKPSNTKVDKKVEPKSCDKTHTAPPAPAPELLGGPDVFLFPPKPKDTLMISRTPEVTCVVVAVSHEDPEVKFNWYVDGVEVHNAKTKPREEQYNSTYRVVSVLTVLHQDWLNGKEYKCKVSNKALPAPTEKTISKAKGQPREPQVYTLPPSRDELTKNQVSLTCLVKGFYPSDIAVEWESNGQPENNYKTTPPVLDSDGSFFLYSRLTVDKSRWQQGNVFSCSVMHEALHNHYTQKSLSLSPGK

SEQ ID NO: 265 - DNA, 993 bp, Artificial Sequence
  Description of the artificial sequence: base sequence of IgG1_AA_S239D/A330F_D265A_K409R CH
gctagcaccaagggcccatcggtcttccccctggcaccctcctccaagagcacctctgggggcacagcggccctgggctgcctggtcaaggactacttccccgaaccggtgacggtgtcgtggaactcaggcgccctgaccagcggcgtgcacaccttcccggctgtcctacagtcctcaggactctactccctcagcagcgtggtgaccgtgccctccagcagcttgggcacccagacctacatctgcaacgtgaatcacaagcccagcaacaccaaggtggacaagaaagttgagcccaaatcttgtgacaaaactcacacagcgccaccggcgccagcacctgaactcctggggggaccggatgtcttcctcttccccccaaaacccaaggacaccctcatgatctcccggacccctgaggtcacatgcgtggtggtggccgtgagccacgaagaccctgaggtcaagttcaactggtacgtggacggcgtggaggtgcataatgccaagacaaagccgcgggaggagcagtacaacagcacgtaccgtgtggtcagcgtcctcaccgtcctgcaccaggactggctgaatggcaaggagtacaagtgcaaggtctccaacaaagccctcccattccccatcgagaaaaccatctccaaagccaaagggcagccccgagaaccacaggtgtacaccctgcccccatcccgggatgagctgaccaagaaccaggtcagcctgacctgcctggtcaaaggcttctatcccagcgacatcgccgtggagtgggagagcaatgggcagccggagaacaactacaagaccacgcctcccgtgctggactccgacggctccttcttcctctacagccggctcaccgtggacaagagcaggtggcagcaggggaacgtcttctcatgctccgtgatgcatgaggctctgcacaaccactacacgcagaagagcctctccctgtctccgggtaaatga

SEQ ID NO: 266 - protein, 330 aa, Artificial Sequence
  Description of the artificial sequence: amino acid sequence of IgG1_AA_S239D/A330F_D265A_K409R CH
ASTKGPSVFPLAPSSKSTSGGTAALGCLVKDYFPEPVTVSWNSGALTSGVHTFPAVLQSSGLYSLSSVVTVPSSSLGTQTYICNVNHKPSNTKVDKKVEPKSCDKTHTAPPAPAPELLGGPDVFLFPPKPKDTLMISRTPEVTCVVVAVSHEDPEVKFNWYVDGVEVHNAKTKPREEQYNSTYRVVSVLTVLHQDWLNGKEYKCKVSNKALPFPIEKTISKAKGQPREPQVYTLPPSRDELTKNQVSLTCLVKGFYPSDIAVEWESNGQPENNYKTTPPVLDSDGSFFLYSRLTVDKSRWQQGNVFSCSVMHEALHNHYTQKSLSLSPGK

SEQ ID NO: 267 - DNA, 993 bp, Artificial Sequence
  Description of the artificial sequence: base sequence of IgG1_AA_S239D_D265A_K409R CH
gctagcaccaagggcccatcggtcttccccctggcaccctcctccaagagcacctctgggggcacagcggccctgggctgcctggtcaaggactacttccccgaaccggtgacggtgtcgtggaactcaggcgccctgaccagcggcgtgcacaccttcccggctgtcctacagtcctcaggactctactccctcagcagcgtggtgaccgtgccctccagcagcttgggcacccagacctacatctgcaacgtgaatcacaagcccagcaacaccaaggtggacaagaaagttgagcccaaatcttgtgacaaaactcacacagcgccaccggcgccagcacctgaactcctggggggaccggatgtcttcctcttccccccaaaacccaaggacaccctcatgatctcccggacccctgaggtcacatgcgtggtggtggccgtgagccacgaagaccctgaggtcaagttcaactggtacgtggacggcgtggaggtgcataatgccaagacaaagccgcgggaggagcagtacaacagcacgtaccgtgtggtcagcgtcctcaccgtcctgcaccaggactggctgaatggcaaggagtacaagtgcaaggtctccaacaaagccctcccagcccccatcgagaaaaccatctccaaagccaaagggcagccccgagaaccacaggtgtacaccctgcccccatcccgggatgagctgaccaagaaccaggtcagcctgacctgcctggtcaaaggcttctatcccagcgacatcgccgtggagtgggagagcaatgggcagccggagaacaactacaagaccacgcctcccgtgctggactccgacggctccttcttcctctacagccggctcaccgtggacaagagcaggtggcagcaggggaacgtcttctcatgctccgtgatgcatgaggctctgcacaaccactacacgcagaagagcctctccctgtctccgggtaaatga

SEQ ID NO: 268 - protein, 330 aa, Artificial Sequence
  Description of the artificial sequence: amino acid sequence of IgG1_AA_S239D_D265A_K409R CH
ASTKGPSVFPLAPSSKSTSGGTAALGCLVKDYFPEPVTVSWNSGALTSGVHTFPAVLQSSGLYSLSSVVTVPSSSLGTQTYICNVNHKPSNTKVDKKVEPKSCDKTHTAPPAPAPELLGGPDVFLFPPKPKDTLMISRTPEVTCVVVAVSHEDPEVKFNWYVDGVEVHNAKTKPREEQYNSTYRVVSVLTVLHQDWLNGKEYKCKVSNKALPAPIEKTISKAKGQPREPQVYTLPPSRDELTKNQVSLTCLVKGFYPSDIAVEWESNGQPENNYKTTPPVLDSDGSFFLYSRLTVDKSRWQQGNVFSCSVMHEALHNHYTQKSLSLSPGK

SEQ ID NO: 269 - DNA, 993 bp, Artificial Sequence
  Description of the artificial sequence: base sequence of IgG1_AA_AAA/S239D_L309K_D265A_K409R CH
gctagcaccaagggcccatcggtcttccccctggcaccctcctccaagagcacctctgggggcacagcggccctgggctgcctggtcaaggactacttccccgaaccggtgacggtgtcgtggaactcaggcgccctgaccagcggcgtgcacaccttcccggctgtcctacagtcctcaggactctactccctcagcagcgtggtgaccgtgccctccagcagcttgggcacccagacctacatctgcaacgtgaatcacaagcccagcaacaccaaggtggacaagaaagttgagcccaaatcttgtgacaaaactcacacagcgccaccggcgccagcacctgaactcctggggggaccggatgtcttcctcttccccccaaaacccaaggacaccctcatgatctcccggacccctgaggtcacatgcgtggtggtggccgtgagccacgaagaccctgaggtcaagttcaactggtacgtggacggcgtggaggtgcataatgccaagacaaagccgcgggaggagcagtacaacgccacgtaccgtgtggtcagcgtcctcaccgtcaagcaccaggactggctgaatggcaaggagtacaagtgcaaggtctccaacaaagccctcccagcccccatcgcggcaaccatctccaaagccaaagggcagccccgagaaccacaggtgtacaccctgcccccatcccgggatgagctgaccaagaaccaggtcagcctgacctgcctggtcaaaggcttctatcccagcgacatcgccgtggagtgggagagcaatgggcagccggagaacaactacaagaccacgcctcccgtgctggactccgacggctccttcttcctctacagccggctcaccgtggacaagagcaggtggcagcaggggaacgtcttctcatgctccgtgatgcatgaggctctgcacaaccactacacgcagaagagcctctccctgtctccgggtaaatga

SEQ ID NO: 270 - protein, 330 aa, Artificial Sequence
  Description of the artificial sequence: amino acid sequence of IgG1_AA_AAA/S239D/L309K_D265A_K409R CH
ASTKGPSVFPLAPSSKSTSGGTAALGCLVKDYFPEPVTVSWNSGALTSGVHTFPAVLQSSGLYSLSSVVTVPSSSLGTQTYICNVNHKPSNTKVDKKVEPKSCDKTHTAPPAPAPELLGGPDVFLFPPKPKDTLMISRTPEVTCVVVAVSHEDPEVKFNWYVDGVEVHNAKTKPREEQYNATYRVVSVLTVKHQDWLNGKEYKCKVSNKALPAPIAATISKAKGQPREPQVYTLPPSRDELTKNQVSLTCLVKGFYPSDIAVEWESNGQPENNYKTTPPVLDSDGSFFLYSRLTVDKSRWQQGNVFSCSVMHEALHNHYTQKSLSLSPGK

SEQ ID NO: 271 - DNA, 993 bp, Artificial Sequence
  Description of the artificial sequence: base sequence of IgG1_AA_S239D/S298A/E333A/L242C/K334C_D265A_K409R CH
gctagcaccaagggcccatcggtcttccccctggcaccctcctccaagagcacctctgggggcacagcggccctgggctgcctggtcaaggactacttccccgaaccggtgacggtgtcgtggaactcaggcgccctgaccagcggcgtgcacaccttcccggctgtcctacagtcctcaggactctactccctcagcagcgtggtgaccgtgccctccagcagcttgggcacccagacctacatctgcaacgtgaatcacaagcccagcaacaccaaggtggacaagaaagttgagcccaaatcttgtgacaaaactcacacagcgccaccggcgccagcacctgaactcctggggggaccggatgtcttctgcttccccccaaaacccaaggacaccctcatgatctcccggacccctgaggtcacatgcgtggtggtggccgtgagccacgaagaccctgaggtcaagttcaactggtacgtggacggcgtggaggtgcataatgccaagacaaagccgcgggaggagcagtacaacgccacgtaccgtgtggtcagcgtcctcaccgtcctgcaccaggactggctgaatggcaaggagtacaagtgcaaggtctccaacaaagccctcccagcccccatcgcgtgtaccatctccaaagccaaagggcagccccgagaaccacaggtgtacaccctgcccccatcccgggatgagctgaccaagaaccaggtcagcctgacctgcctggtcaaaggcttctatcccagcgacatcgccgtggagtgggagagcaatgggcagccggagaacaactacaagaccacgcctcccgtgctggactccgacggctccttcttcctctacagccggctcaccgtggacaagagcaggtggcagcaggggaacgtcttctcatgctccgtgatgcatgaggctctgcacaaccactacacgcagaagagcctctccctgtctccgggtaaatga

SEQ ID NO: 272 - protein, 330 aa, Artificial Sequence
  Description of the artificial sequence: amino acid sequence of IgG1_AA_S239D/S298A/E333A/L242C/K334C_D265A_K409R CH
ASTKGPSVFPLAPSSKSTSGGTAALGCLVKDYFPEPVTVSWNSGALTSGVHTFPAVLQSSGLYSLSSVVTVPSSSLGTQTYICNVNHKPSNTKVDKKVEPKSCDKTHTAPPAPAPELLGGPDVFCFPPKPKDTLMISRTPEVTCVVVAVSHEDPEVKFNWYVDGVEVHNAKTKPREEQYNATYRVVSVLTVLHQDWLNGKEYKCKVSNKALPAPIACTISKAKGQPREPQVYTLPPSRDELTKNQVSLTCLVKGFYPSDIAVEWESNGQPENNYKTTPPVLDSDGSFFLYSRLTVDKSRWQQGNVFSCSVMHEALHNHYTQKSLSLSPGK

SEQ ID NO: 273 - DNA, 993 bp, Artificial Sequence
  Description of the artificial sequence: base sequence of IgG1_AA_S239D/K326E_P329Y_K409R CH
gctagcaccaagggcccatcggtcttccccctggcaccctcctccaagagcacctctgggggcacagcggccctgggctgcctggtcaaggactacttccccgaaccggtgacggtgtcgtggaactcaggcgccctgaccagcggcgtgcacaccttcccggctgtcctacagtcctcaggactctactccctcagcagcgtggtgaccgtgccctccagcagcttgggcacccagacctacatctgcaacgtgaatcacaagcccagcaacaccaaggtggacaagaaagttgagcccaaatcttgtgacaaaactcacacagcgccaccggcgccagcacctgaactcctggggggaccggatgtcttcctcttccccccaaaacccaaggacaccctcatgatctcccggacccctgaggtcacatgcgtggtggtggacgtgagccacgaagaccctgaggtcaagttcaactggtacgtggacggcgtggaggtgcataatgccaagacaaagccgcgggaggagcagtacaacagcacgtaccgtgtggtcagcgtcctcaccgtcctgcaccaggactggctgaatggcaaggagtacaagtgcaaggtctccaacgaagccctctacgcccccatcgagaaaaccatctccaaagccaaagggcagccccgagaaccacaggtgtacaccctgcccccatcccgggatgagctgaccaagaaccaggtcagcctgacctgcctggtcaaaggcttctatcccagcgacatcgccgtggagtgggagagcaatgggcagccggagaacaactacaagaccacgcctcccgtgctggactccgacggctccttcttcctctacagccggctcaccgtggacaagagcaggtggcagcaggggaacgtcttctcatgctccgtgatgcatgaggctctgcacaaccactacacgcagaagagcctctccctgtctccgggtaaatga

SEQ ID NO: 274 - protein, 330 aa, Artificial Sequence
  Description of the artificial sequence: amino acid sequence of IgG1_AA_S239D/K326E_P329Y_K409R CH
ASTKGPSVFPLAPSSKSTSGGTAALGCLVKDYFPEPVTVSWNSGALTSGVHTFPAVLQSSGLYSLSSVVTVPSSSLGTQTYICNVNHKPSNTKVDKKVEPKSCDKTHTAPPAPAPELLGGPDVFLFPPKPKDTLMISRTPEVTCVVVDVSHEDPEVKFNWYVDGVEVHNAKTKPREEQYNSTYRVVSVLTVLHQDWLNGKEYKCKVSNEALYAPIEKTISKAKGQPREPQVYTLPPSRDELTKNQVSLTCLVKGFYPSDIAVEWESNGQPENNYKTTPPVLDSDGSFFLYSRLTVDKSRWQQGNVFSCSVMHEALHNHYTQKSLSLSPGK

SEQ ID NO: 275 - DNA, 993 bp, Artificial Sequence
  Description of the artificial sequence: base sequence of IgG1_AA_S239D/K326I_P329Y_K409R CH
gctagcaccaagggcccatcggtcttccccctggcaccctcctccaagagcacctctgggggcacagcggccctgggctgcctggtcaaggactacttccccgaaccggtgacggtgtcgtggaactcaggcgccctgaccagcggcgtgcacaccttcccggctgtcctacagtcctcaggactctactccctcagcagcgtggtgaccgtgccctccagcagcttgggcacccagacctacatctgcaacgtgaatcacaagcccagcaacaccaaggtggacaagaaagttgagcccaaatcttgtgacaaaactcacacagcgccaccggcgccagcacctgaactcctggggggaccggatgtcttcctcttccccccaaaacccaaggacaccctcatgatctcccggacccctgaggtcacatgcgtggtggtggacgtgagccacgaagaccctgaggtcaagttcaactggtacgtggacggcgtggaggtgcataatgccaagacaaagccgcgggaggagcagtacaacagcacgtaccgtgtggtcagcgtcctcaccgtcctgcaccaggactggctgaatggcaaggagtacaagtgcaaggtctccaacatagccctctacgcccccatcgagaaaaccatctccaaagccaaagggcagccccgagaaccacaggtgtacaccctgcccccatcccgggatgagctgaccaagaaccaggtcagcctgacctgcctggtcaaaggcttctatcccagcgacatcgccgtggagtgggagagcaatgggcagccggagaacaactacaagaccacgcctcccgtgctggactccgacggctccttcttcctctacagccggctcaccgtggacaagagcaggtggcagcaggggaacgtcttctcatgctccgtgatgcatgaggctctgcacaaccactacacgcagaagagcctctccctgtctccgggtaaatga

SEQ ID NO: 276 - protein, 330 aa, Artificial Sequence
  Description of the artificial sequence: amino acid sequence of IgG1_AA_S239D/K326I_P329Y_K409R CH
ASTKGPSVFPLAPSSKSTSGGTAALGCLVKDYFPEPVTVSWNSGALTSGVHTFPAVLQSSGLYSLSSVVTVPSSSLGTQTYICNVNHKPSNTKVDKKVEPKSCDKTHTAPPAPAPELLGGPDVFLFPPKPKDTLMISRTPEVTCVVVDVSHEDPEVKFNWYVDGVEVHNAKTKPREEQYNSTYRVVSVLTVLHQDWLNGKEYKCKVSNIALYAPIEKTISKAKGQPREPQVYTLPPSRDELTKNQVSLTCLVKGFYPSDIAVEWESNGQPENNYKTTPPVLDSDGSFFLYSRLTVDKSRWQQGNVFSCSVMHEALHNHYTQKSLSLSPGK

SEQ ID NO: 277 - DNA, 993 bp, Artificial Sequence
  Description of the artificial sequence: base sequence of IgG1_AA_AAA/H268E_P329Y_K409R CH
gctagcaccaagggcccatcggtcttccccctggcaccctcctccaagagcacctctgggggcacagcggccctgggctgcctggtcaaggactacttccccgaaccggtgacggtgtcgtggaactcaggcgccctgaccagcggcgtgcacaccttcccggctgtcctacagtcctcaggactctactccctcagcagcgtggtgaccgtgccctccagcagcttgggcacccagacctacatctgcaacgtgaatcacaagcccagcaacaccaaggtggacaagaaagttgagcccaaatcttgtgacaaaactcacacagcgccaccggcgccagcacctgaactcctggggggaccgtcagtcttcctcttccccccaaaacccaaggacaccctcatgatctcccggacccctgaggtcacatgcgtggtggtggacgtgagcgaggaagaccctgaggtcaagttcaactggtacgtggacggcgtggaggtgcataatgccaagacaaagccgcgggaggagcagtacaacgccacgtaccgtgtggtcagcgtcctcaccgtcctgcaccaggactggctgaatggcaaggagtacaagtgcaaggtctccaacaaagccctctacgcccccatcgcggcaaccatctccaaagccaaagggcagccccgagaaccacaggtgtacaccctgcccccatcccgggatgagctgaccaagaaccaggtcagcctgacctgcctggtcaaaggcttctatcccagcgacatcgccgtggagtgggagagcaatgggcagccggagaacaactacaagaccacgcctcccgtgctggactccgacggctccttcttcctctacagccggctcaccgtggacaagagcaggtggcagcaggggaacgtcttctcatgctccgtgatgcatgaggctctgcacaaccactacacgcagaagagcctctccctgtctccgggtaaatga

SEQ ID NO: 278 - protein, 330 aa, Artificial Sequence; identical to SEQ ID NO: 274
  Description of the artificial sequence: amino acid sequence of IgG1_AA_AAA/H268E_P329Y_K409R CH

SEQ ID NO: 279 - DNA, 993 bp, Artificial Sequence
  Description of the artificial sequence: base sequence of IgG1_AA_S298A/E333A/K334E_P329Y_K409R CH
gctagcaccaagggcccatcggtcttccccctggcaccctcctccaagagcacctctgggggcacagcggccctgggctgcctggtcaaggactacttccccgaaccggtgacggtgtcgtggaactcaggcgccctgaccagcggcgtgcacaccttcccggctgtcctacagtcctcaggactctactccctcagcagcgtggtgaccgtgccctccagcagcttgggcacccagacctacatctgcaacgtgaatcacaagcccagcaacaccaaggtggacaagaaagttgagcccaaatcttgtgacaaaactcacacagcgccaccggcgccagcacctgaactcctggggggaccgtcagtcttcctcttccccccaaaacccaaggacaccctcatgatctcccggacccctgaggtcacatgcgtggtggtggacgtgagccacgaagaccctgaggtcaagttcaactggtacgtggacggcgtggaggtgcataatgccaagacaaagccgcgggaggagcagtacaacgccacgtaccgtgtggtcagcgtcctcaccgtcctgcaccaggactggctgaatggcaaggagtacaagtgcaaggtctccaacaaagccctctacgcccccatcgcggaaaccatctccaaagccaaagggcagccccgagaaccacaggtgtacaccctgcccccatcccgggatgagctgaccaagaaccaggtcagcctgacctgcctggtcaaaggcttctatcccagcgacatcgccgtggagtgggagagcaatgggcagccggagaacaactacaagaccacgcctcccgtgctggactccgacggctccttcttcctctacagccggctcaccgtggacaagagcaggtggcagcaggggaacgtcttctcatgctccgtgatgcatgaggctctgcacaaccactacacgcagaagagcctctccctgtctccgggtaaatga

SEQ ID NO: 280 - protein, 330 aa, Artificial Sequence
  Description of the artificial sequence: amino acid sequence of IgG1_AA_S298A/E333A/K334E_P329Y_K409R CH
ASTKGPSVFPLAPSSKSTSGGTAALGCLVKDYFPEPVTVSWNSGALTSGVHTFPAVLQSSGLYSLSSVVTVPSSSLGTQTYICNVNHKPSNTKVDKKVEPKSCDKTHTAPPAPAPELLGGPDVFCFPPKPKDTLMISRTPEVTCVVVDVSHEDPEVKFNWYVDGVEVHNAKTKPREEQYNATYRVVSVLTVLHQDWLNGKEYKCKVSNKALYAPIACTISKAKGQPREPQVYTLPPSRDELTKNQVSLTCLVKGFYPSDIAVEWESNGQPENNYKTTPPVLDSDGSFFLYSRLTVDKSRWQQGNVFSCSVMHEALHNHYTQKSLSLSPGK

SEQ ID NO: 281 - DNA, 993 bp, Artificial Sequence
  Description of the artificial sequence: base sequence of IgG1_AA_S239E/I332E_P329Y_K409R CH
gctagcaccaagggcccatcggtcttccccctggcaccctcctccaagagcacctctgggggcacagcggccctgggctgcctggtcaaggactacttccccgaaccggtgacggtgtcgtggaactcaggcgccctgaccagcggcgtgcacaccttcccggctgtcctacagtcctcaggactctactccctcagcagcgtggtgaccgtgccctccagcagcttgggcacccagacctacatctgcaacgtgaatcacaagcccagcaacaccaaggtggacaagaaagttgagcccaaatcttgtgacaaaactcacacagcgccaccggcgccagcacctgaactcctggggggaccggaagtcttcctcttccccccaaaacccaaggacaccctcatgatctcccggacccctgaggtcacatgcgtggtggtggacgtgagccacgaagaccctgaggtcaagttcaactggtacgtggacggcgtggaggtgcataatgccaagacaaagccgcgggaggagcagtacaacagcacgtaccgtgtggtcagcgtcctcaccgtcctgcaccaggactggctgaatggcaaggagtacaagtgcaaggtctccaacaaagccctctacgcccccgaagagaaaaccatctccaaagccaaagggcagccccgagaaccacaggtgtacaccctgcccccatcccgggatgagctgaccaagaaccaggtcagcctgacctgcctggtcaaaggcttctatcccagcgacatcgccgtggagtgggagagcaatgggcagccggagaacaactacaagaccacgcctcccgtgctggactccgacggctccttcttcctctacagccggctcaccgtggacaagagcaggtggcagcaggggaacgtcttctcatgctccgtgatgcatgaggctctgcacaaccactacacgcagaagagcctctccctgtctccgggtaaatga

SEQ ID NO: 282 - protein, 330 aa, Artificial Sequence
  Description of the artificial sequence: amino acid sequence of IgG1_AA_S239E/I332E_P329Y_K409R CH
ASTKGPSVFPLAPSSKSTSGGTAALGCLVKDYFPEPVTVSWNSGALTSGVHTFPAVLQSSGLYSLSSVVTVPSSSLGTQTYICNVNHKPSNTKVDKKVEPKSCDKTHTAPPAPAPELLGGPEVFLFPPKPKDTLMISRTPEVTCVVVDVSHEDPEVKFNWYVDGVEVHNAKTKPREEQYNSTYRVVSVLTVLHQDWLNGKEYKCKVSNKALYAPEEKTISKAKGQPREPQVYTLPPSRDELTKNQVSLTCLVKGFYPSDIAVEWESNGQPENNYKTTPPVLDSDGSFFLYSRLTVDKSRWQQGNVFSCSVMHEALHNHYTQKSLSLSPGK

SEQ ID NO: 283 - DNA, 993 bp, Artificial Sequence
  Description of the artificial sequence: base sequence of IgG1_AA_S239D/I332T_P329Y_K409R CH
gctagcaccaagggcccatcggtcttccccctggcaccctcctccaagagcacctctgggggcacagcggccctgggctgcctggtcaaggactacttccccgaaccggtgacggtgtcgtggaactcaggcgccctgaccagcggcgtgcacaccttcccggctgtcctacagtcctcaggactctactccctcagcagcgtggtgaccgtgccctccagcagcttgggcacccagacctacatctgcaacgtgaatcacaagcccagcaacaccaaggtggacaagaaagttgagcccaaatcttgtgacaaaactcacacagcgccaccggcgccagcacctgaactcctggggggaccggatgtcttcctcttccccccaaaacccaaggacaccctcatgatctcccggacccctgaggtcacatgcgtggtggtggacgtgagccacgaagaccctgaggtcaagttcaactggtacgtggacggcgtggaggtgcataatgccaagacaaagccgcgggaggagcagtacaacagcacgtaccgtgtggtcagcgtcctcaccgtcctgcaccaggactggctgaatggcaaggagtacaagtgcaaggtctccaacaaagccctctacgcccccactgagaaaaccatctccaaagccaaagggcagccccgagaaccacaggtgtacaccctgcccccatcccgggatgagctgaccaagaaccaggtcagcctgacctgcctggtcaaaggcttctatcccagcgacatcgccgtggagtgggagagcaatgggcagccggagaacaactacaagaccacgcctcccgtgctggactccgacggctccttcttcctctacagccggctcaccgtggacaagagcaggtggcagcaggggaacgtcttctcatgctccgtgatgcatgaggctctgcacaaccactacacgcagaagagcctctccctgtctccgggtaaatga

SEQ ID NO: 284 - protein, 330 aa, Artificial Sequence
  Description of the artificial sequence: amino acid sequence of IgG1_AA_S239D/I332T_P329Y_K409R CH
ASTKGPSVFPLAPSSKSTSGGTAALGCLVKDYFPEPVTVSWNSGALTSGVHTFPAVLQSSGLYSLSSVVTVPSSSLGTQTYICNVNHKPSNTKVDKKVEPKSCDKTHTAPPAPAPELLGGPDVFLFPPKPKDTLMISRTPEVTCVVVDVSHEDPEVKFNWYVDGVEVHNAKTKPREEQYNSTYRVVSVLTVLHQDWLNGKEYKCKVSNKALYAPTEKTISKAKGQPREPQVYTLPPSRDELTKNQVSLTCLVKGFYPSDIAVEWESNGQPENNYKTTPPVLDSDGSFFLYSRLTVDKSRWQQGNVFSCSVMHEALHNHYTQKSLSLSPGK

SEQ ID NO: 285 - DNA, 993 bp, Artificial Sequence
  Description of the artificial sequence: base sequence of IgG1_AA_S239D/A330F_P329Y_K409R CH
gctagcaccaagggcccatcggtcttccccctggcaccctcctccaagagcacctctgggggcacagcggccctgggctgcctggtcaaggactacttccccgaaccggtgacggtgtcgtggaactcaggcgccctgaccagcggcgtgcacaccttcccggctgtcctacagtcctcaggactctactccctcagcagcgtggtgaccgtgccctccagcagcttgggcacccagacctacatctgcaacgtgaatcacaagcccagcaacaccaaggtggacaagaaagttgagcccaaatcttgtgacaaaactcacacagcgccaccggcgccagcacctgaactcctggggggaccggatgtcttcctcttccccccaaaacccaaggacaccctcatgatctcccggacccctgaggtcacatgcgtggtggtggacgtgagccacgaagaccctgaggtcaagttcaactggtacgtggacggcgtggaggtgcataatgccaagacaaagccgcgggaggagcagtacaacagcacgtaccgtgtggtcagcgtcctcaccgtcctgcaccaggactggctgaatggcaaggagtacaagtgcaaggtctccaacaaagccctctacttccccatcgagaaaaccatctccaaagccaaagggcagccccgagaaccacaggtgtacaccctgcccccatcccgggatgagctgaccaagaaccaggtcagcctgacctgcctggtcaaaggcttctatcccagcgacatcgccgtggagtgggagagcaatgggcagccggagaacaactacaagaccacgcctcccgtgctggactccgacggctccttcttcctctacagccggctcaccgtggacaagagcaggtggcagcaggggaacgtcttctcatgctccgtgatgcatgaggctctgcacaaccactacacgcagaagagcctctccctgtctccgggtaaatga

SEQ ID NO: 286 - protein, 330 aa, Artificial Sequence
  Description of the artificial sequence: amino acid sequence of IgG1_AA_S239D/A330F_P329Y_K409R CH
ASTKGPSVFPLAPSSKSTSGGTAALGCLVKDYFPEPVTVSWNSGALTSGVHTFPAVLQSSGLYSLSSVVTVPSSSLGTQTYICNVNHKPSNTKVDKKVEPKSCDKTHTAPPAPAPELLGGPDVFLFPPKPKDTLMISRTPEVTCVVVDVSHEDPEVKFNWYVDGVEVHNAKTKPREEQYNSTYRVVSVLTVLHQDWLNGKEYKCKVSNKALYFPIEKTISKAKGQPREPQVYTLPPSRDELTKNQVSLTCLVKGFYPSDIAVEWESNGQPENNYKTTPPVLDSDGSFFLYSRLTVDKSRWQQGNVFSCSVMHEALHNHYTQKSLSLSPGK

SEQ ID NO: 287 - DNA, 993 bp, Artificial Sequence
  Description of the artificial sequence: base sequence of IgG1_AA_S239D_P329Y_K409R CH
gctagcaccaagggcccatcggtcttccccctggcaccctcctccaagagcacctctgggggcacagcggccctgggctgcctggtcaaggactacttccccgaaccggtgacggtgtcgtggaactcaggcgccctgaccagcggcgtgcacaccttcccggctgtcctacagtcctcaggactctactccctcagcagcgtggtgaccgtgccctccagcagcttgggcacccagacctacatctgcaacgtgaatcacaagcccagcaacaccaaggtggacaagaaagttgagcccaaatcttgtgacaaaactcacacagcgccaccggcgccagcacctgaactcctggggggaccggatgtcttcctcttccccccaaaacccaaggacaccctcatgatctcccggacccctgaggtcacatgcgtggtggtggacgtgagccacgaagaccctgaggtcaagttcaactggtacgtggacggcgtggaggtgcataatgccaagacaaagccgcgggaggagcagtacaacagcacgtaccgtgtggtcagcgtcctcaccgtcctgcaccaggactggctgaatggcaaggagtacaagtgcaaggtctccaacaaagccctctacgcccccatcgagaaaaccatctccaaagccaaagggcagccccgagaaccacaggtgtacaccctgcccccatcccgggatgagctgaccaagaaccaggtcagcctgacctgcctggtcaaaggcttctatcccagcgacatcgccgtggagtgggagagcaatgggcagccggagaacaactacaagaccacgcctcccgtgctggactccgacggctccttcttcctctacagccggctcaccgtggacaagagcaggtggcagcaggggaacgtcttctcatgctccgtgatgcatgaggctctgcacaaccactacacgcagaagagcctctccctgtctccgggtaaatga

SEQ ID NO: 288 - protein, 330 aa, Artificial Sequence
  Description of the artificial sequence: amino acid sequence of IgG1_AA_S239D_P329Y_K409R CH
ASTKGPSVFPLAPSSKSTSGGTAALGCLVKDYFPEPVTVSWNSGALTSGVHTFPAVLQSSGLYSLSSVVTVPSSSLGTQTYICNVNHKPSNTKVDKKVEPKSCDKTHTAPPAPAPELLGGPDVFLFPPKPKDTLMISRTPEVTCVVVDVSHEDPEVKFNWYVDGVEVHNAKTKPREEQYNSTYRVVSVLTVLHQDWLNGKEYKCKVSNKALYAPIEKTISKAKGQPREPQVYTLPPSRDELTKNQVSLTCLVKGFYPSDIAVEWESNGQPENNYKTTPPVLDSDGSFFLYSRLTVDKSRWQQGNVFSCSVMHEALHNHYTQKSLSLSPGK

SEQ ID NO: 289 - DNA, 993 bp, Artificial Sequence
  Description of the artificial sequence: base sequence of IgG1_AA_AAA/S239D/L309K_P329Y_K409R CH
gctagcaccaagggcccatcggtcttccccctggcaccctcctccaagagcacctctgggggcacagcggccctgggctgcctggtcaaggactacttccccgaaccggtgacggtgtcgtggaactcaggcgccctgaccagcggcgtgcacaccttcccggctgtcctacagtcctcaggactctactccctcagcagcgtggtgaccgtgccctccagcagcttgggcacccagacctacatctgcaacgtgaatcacaagcccagcaacaccaaggtggacaagaaagttgagcccaaatcttgtgacaaaactcacacagcgccaccggcgccagcacctgaactcctggggggaccggatgtcttcctcttccccccaaaacccaaggacaccctcatgatctcccggacccctgaggtcacatgcgtggtggtggacgtgagccacgaagaccctgaggtcaagttcaactggtacgtggacggcgtggaggtgcataatgccaagacaaagccgcgggaggagcagtacaacgccacgtaccgtgtggtcagcgtcctcaccgtcaagcaccaggactggctgaatggcaaggagtacaagtgcaaggtctccaacaaagccctctacgcccccatcgcggcaaccatctccaaagccaaagggcagccccgagaaccacaggtgtacaccctgcccccatcccgggatgagctgaccaagaaccaggtcagcctgacctgcctggtcaaaggcttctatcccagcgacatcgccgtggagtgggagagcaatgggcagccggagaacaactacaagaccacgcctcccgtgctggactccgacggctccttcttcctctacagccggctcaccgtggacaagagcaggtggcagcaggggaacgtcttctcatgctccgtgatgcatgaggctctgcacaaccactacacgcagaagagcctctccctgtctccgggtaaatga

SEQ ID NO: 290 - protein, 330 aa, Artificial Sequence
  Description of the artificial sequence: amino acid sequence of IgG1_AA_AAA/S239D/L309K_P329Y_K409R CH
ASTKGPSVFPLAPSSKSTSGGTAALGCLVKDYFPEPVTVSWNSGALTSGVHTFPAVLQSSGLYSLSSVVTVPSSSLGTQTYICNVNHKPSNTKVDKKVEPKSCDKTHTAPPAPAPELLGGPDVFLFPPKPKDTLMISRTPEVTCVVVDVSHEDPEVKFNWYVDGVEVHNAKTKPREEQYNATYRVVSVLTVKHQDWLNGKEYKCKVSNKALYAPIAATISKAKGQPREPQVYTLPPSRDELTKNQVSLTCLVKGFYPSDIAVEWESNGQPENNYKTTPPVLDSDGSFFLYSRLTVDKSRWQQGNVFSCSVMHEALHNHYTQKSLSLSPGK

SEQ ID NO: 291 - DNA, 993 bp, Artificial Sequence
  Description of the artificial sequence: base sequence of IgG1_AA_S239D/S298A/E333A/L242C/K334C_P329Y_K409R CH
gctagcaccaagggcccatcggtcttccccctggcaccctcctccaagagcacctctgggggcacagcggccctgggctgcctggtcaaggactacttccccgaaccggtgacggtgtcgtggaactcaggcgccctgaccagcggcgtgcacaccttcccggctgtcctacagtcctcaggactctactccctcagcagcgtggtgaccgtgccctccagcagcttgggcacccagacctacatctgcaacgtgaatcacaagcccagcaacaccaaggtggacaagaaagttgagcccaaatcttgtgacaaaactcacacagcgccaccggcgccagcacctgaactcctggggggaccggatgtcttctgcttccccccaaaacccaaggacaccctcatgatctcccggacccctgaggtcacatgcgtggtggtggacgtgagccacgaagaccctgaggtcaagttcaactggtacgtggacggcgtggaggtgcataatgccaagacaaagccgcgggaggagcagtacaacgccacgtaccgtgtggtcagcgtcctcaccgtcctgcaccaggactggctgaatggcaaggagtacaagtgcaaggtctccaacaaagccctctacgcccccatcgcgtgtaccatctccaaagccaaagggcagccccgagaaccacaggtgtacaccctgcccccatcccgggatgagctgaccaagaaccaggtcagcctgacctgcctggtcaaaggcttctatcccagcgacatcgccgtggagtgggagagcaatgggcagccggagaacaactacaagaccacgcctcccgtgctggactccgacggctccttcttcctctacagccggctcaccgtggacaagagcaggtggcagcaggggaacgtcttctcatgctccgtgatgcatgaggctctgcacaaccactacacgcagaagagcctctccctgtctccgggtaaatga

SEQ ID NO: 292 - protein, 330 aa, Artificial Sequence; identical to SEQ ID NO: 280
  Description of the artificial sequence: amino acid sequence of IgG1_AA_S239D/S298A/E333A/L242C/K334C_P329Y_K409R CH

SEQ ID NO: 293 - DNA, 993 bp, Artificial Sequence
  Description of the artificial sequence: base sequence of S239D/K326T_S298E_K409R_CH
gctagcaccaagggcccatcggtcttccccctggcaccctcctccaagagcacctctgggggcacagcggccctgggctgcctggtcaaggactacttccccgaaccggtgacggtgtcgtggaactcaggcgccctgaccagcggcgtgcacaccttcccggctgtcctacagtcctcaggactctactccctcagcagcgtggtgaccgtgccctccagcagcttgggcacccagacctacatctgcaacgtgaatcacaagcccagcaacaccaaggtggacaagaaagttgagcccaaatcttgtgacaaaactcacacagcgccaccggcgccagcacctgaactcctggggggaccggatgtcttcctcttccccccaaaacccaaggacaccctcatgatctcccggacccctgaggtcacatgcgtggtggtggacgtgagccacgaagaccctgaggtcaagttcaactggtacgtggacggcgtggaggtgcataatgccaagacaaagccgcgggaggagcagtacaacgagacgtaccgtgtggtcagcgtcctcaccgtcctgcaccaggactggctgaatggcaaggagtacaagtgcaaggtctccaacacagccctcccagcccccatcgagaaaaccatctccaaagccaaagggcagccccgagaaccacaggtgtacaccctgcccccatcccgggatgagctgaccaagaaccaggtcagcctgacctgcctggtcaaaggcttctatcccagcgacatcgccgtggagtgggagagcaatgggcagccggagaacaactacaagaccacgcctcccgtgctggactccgacggctccttcttcctctacagccggctcaccgtggacaagagcaggtggcagcaggggaacgtcttctcatgctccgtgatgcatgaggctctgcacaaccactacacgcagaagagcctctccctgtctccgggtaaatga

SEQ ID NO: 294 - protein, 330 aa, Artificial Sequence
  Description of the artificial sequence: amino acid sequence of S239D/K326T_S298E_K409R_CH
ASTKGPSVFPLAPSSKSTSGGTAALGCLVKDYFPEPVTVSWNSGALTSGVHTFPAVLQSSGLYSLSSVVTVPSSSLGTQTYICNVNHKPSNTKVDKKVEPKSCDKTHTAPPAPAPELLGGPDVFLFPPKPKDTLMISRTPEVTCVVVDVSHEDPEVKFNWYVDGVEVHNAKTKPREEQYNETYRVVSVLTVLHQDWLNGKEYKCKVSNTALPAPIEKTISKAKGQPREPQVYTLPPSRDELTKNQVSLTCLVKGFYPSDIAVEWESNGQPENNYKTTPPVLDSDGSFFLYSRLTVDKSRWQQGNVFSCSVMHEALHNHYTQKSLSLSPGK

SEQ ID NO: 295 - DNA, 993 bp, Artificial Sequence
  Description of the artificial sequence: base sequence of S239D/S298A/E333A/K334A_S298E_K409R_CH
gctagcaccaagggcccatcggtcttccccctggcaccctcctccaagagcacctctgggggcacagcggccctgggctgcctggtcaaggactacttccccgaaccggtgacggtgtcgtggaactcaggcgccctgaccagcggcgtgcacaccttcccggctgtcctacagtcctcaggactctactccctcagcagcgtggtgaccgtgccctccagcagcttgggcacccagacctacatctgcaacgtgaatcacaagcccagcaacaccaaggtggacaagaaagttgagcccaaatcttgtgacaaaactcacacagcgccaccggcgccagcacctgaactcctggggggaccggatgtcttctgcttccccccaaaacccaaggacaccctcatgatctcccggacccctgaggtcacatgcgtggtggtggacgtgagccacgaagaccctgaggtcaagttcaactggtacgtggacggcgtggaggtgcataatgccaagacaaagccgcgggaggagcagtacaacgagacgtaccgtgtggtcagcgtcctcaccgtcctgcaccaggactggctgaatggcaaggagtacaagtgcaaggtctccaacaaagccctcccagcccccatcgcgtgtaccatctccaaagccaaagggcagccccgagaaccacaggtgtacaccctgcccccatcccgggatgagctgaccaagaaccaggtcagcctgacctgcctggtcaaaggcttctatcccagcgacatcgccgtggagtgggagagcaatgggcagccggagaacaactacaagaccacgcctcccgtgctggactccgacggctccttcttcctctacagccggctcaccgtggacaagagcaggtggcagcaggggaacgtcttctcatgctccgtgatgcatgaggctctgcacaaccactacacgcagaagagcctctccctgtctccgggtaaatga

SEQ ID NO: 296 - protein, 330 aa, Artificial Sequence
  Description of the artificial sequence: amino acid sequence of S239D/S298A/E333A/K334A_S298E_K409R_CH
ASTKGPSVFPLAPSSKSTSGGTAALGCLVKDYFPEPVTVSWNSGALTSGVHTFPAVLQSSGLYSLSSVVTVPSSSLGTQTYICNVNHKPSNTKVDKKVEPKSCDKTHTAPPAPAPELLGGPDVFCFPPKPKDTLMISRTPEVTCVVVDVSHEDPEVKFNWYVDGVEVHNAKTKPREEQYNETYRVVSVLTVLHQDWLNGKEYKCKVSNKALPAPIACTISKAKGQPREPQVYTLPPSRDELTKNQVSLTCLVKGFYPSDIAVEWESNGQPENNYKTTPPVLDSDGSFFLYSRLTVDKSRWQQGNVFSCSVMHEALHNHYTQKSLSLSPGK

SEQ ID NO: 297 - DNA, 993 bp, Artificial Sequence
  Description of the artificial sequence: base sequence of S239D/E333A/L242C/K334C_S298E_K409R_CH
gctagcaccaagggcccatcggtcttccccctggcaccctcctccaagagcacctctgggggcacagcggccctgggctgcctggtcaaggactacttccccgaaccggtgacggtgtcgtggaactcaggcgccctgaccagcggcgtgcacaccttcccggctgtcctacagtcctcaggactctactccctcagcagcgtggtgaccgtgccctccagcagcttgggcacccagacctacatctgcaacgtgaatcacaagcccagcaacaccaaggtggacaagaaagttgagcccaaatcttgtgacaaaactcacacagcgccaccggcgccagcacctgaactcctggggggaccggatgtcttcctcttccccccaaaacccaaggacaccctcatgatctcccggacccctgaggtcacatgcgtggtggtggacgtgagccacgaagaccctgaggtcaagttcaactggtacgtggacggcgtggaggtgcataatgccaagacaaagccgcgggaggagcagtacaacgagacgtaccgtgtggtcagcgtcctcaccgtcctgcaccaggactggctgaatggcaaggagtacaagtgcaaggtctccaacaaagccctcccagcccccatcgcggcaaccatctccaaagccaaagggcagccccgagaaccacaggtgtacaccctgcccccatcccgggatgagctgaccaagaaccaggtcagcctgacctgcctggtcaaaggcttctatcccagcgacatcgccgtggagtgggagagcaatgggcagccggagaacaactacaagaccacgcctcccgtgctggactccgacggctccttcttcctctacagccggctcaccgtggacaagagcaggtggcagcaggggaacgtcttctcatgctccgtgatgcatgaggctctgcacaaccactacacgcagaagagcctctccctgtctccgggtaaatga

SEQ ID NO: 298 - protein, 330 aa, Artificial Sequence
  Description of the artificial sequence: amino acid sequence of S239D/E333A/L242C/K334C_S298E_K409R_CH
ASTKGPSVFPLAPSSKSTSGGTAALGCLVKDYFPEPVTVSWNSGALTSGVHTFPAVLQSSGLYSLSSVVTVPSSSLGTQTYICNVNHKPSNTKVDKKVEPKSCDKTHTAPPAPAPELLGGPDVFLFPPKPKDTLMISRTPEVTCVVVDVSHEDPEVKFNWYVDGVEVHNAKTKPREEQYNETYRVVSVLTVLHQDWLNGKEYKCKVSNKALPAPIAATISKAKGQPREPQVYTLPPSRDELTKNQVSLTCLVKGFYPSDIAVEWESNGQPENNYKTTPPVLDSDGSFFLYSRLTVDKSRWQQGNVFSCSVMHEALHNHYTQKSLSLSPGK
